(19) United States
(12) Patent Application Publication
(10) Pub. No.: US 2020/0263197 A1
(43) Pub. Date: Aug. 20, 2020

(54) TRANSGENIC SELECTION METHODS AND COMPOSITIONS

(71) Applicant: The Jackson Laboratory, Bar Harbor, ME (US)

(72) Inventors: Albert Cheng, Bar Harbor, ME (US); Nathaniel Jillette, Bar Harbor, ME (US); Menghan Du, Bar Harbor, ME (US)

(73) Assignee: The Jackson Laboratory, Bar Harbor, ME (US)

(21) Appl. No.: 16/755,065

(22) PCT Filed: Oct. 11, 2018
(86) PCT No.: PCT/US2018/055412

§ 371 Date: Apr. 9, 2020

Related U.S. Application Data
(60) Provisional application No. 62/624,629, filed on Jan. 31, 2018.
(60) Provisional application No. 62/616,281, filed on Jan. 11, 2018.
(60) Provisional application No. 62/608,478, filed on Dec. 20, 2017.
(60) Provisional application No. 62/571,672, filed on Oct. 12, 2017.

(51) Int. Cl. C12N 15/85; C07K 14/195

(52) U.S. Cl. CPC C12N 15/85; C07K 2319/92; C07K 14/195

(57) ABSTRACT

The present disclosure provides a split intein selectable marker system for the production and selection of transgenic cells.

### RELATED APPLICATIONS

[0001] This application claims the benefit under 35 U.S.C. § 119(e) of U.S. provisional application No. 62/616,281, filed Jan. 11, 2018, U.S. provisional application No. 62/608,478, filed Dec. 20, 2017, U.S. provisional application No. 62/624,629, filed Jan. 31, 2018, U.S. provisional application No. 62/571,672, filed Oct. 12, 2017, which is incorporated by reference herein in its entirety.

### SEQUENCE LISTING

[0002] This application contains a Sequence Listing in computer readable form (filename: J022770007WO00-SEQ-HJD; 1.50 MB—ASCII text file; created Oct. 3, 2018), which is incorporated herein by reference in its entirety and forms part of the disclosure.

### BACKGROUND

[0003] Selectable markers are widely adopted in transgenesis and genome editing for selecting engineered cells with a desired genotype. Antibiotic resistance genes (encoding antibiotic resistance proteins) provide resistance to specific antibiotics so that only cells expressing these resistance genes survive and multiply. Antibiotic resistance genes/antibiotics available for use in eukaryotic cells include hygB/Hygromycin, neo/Geneticin®/G418, pac/Puromycin, Sh bla/Phleomycin D1 (Zeocin™), and bsd/Blasticidin. Fluorescent proteins, such as green fluorescent protein (GFP) provide another means of cell selection, for example, via fluorescent-activated cell sorting (FACS) techniques or fluorescent microscopy.

### SUMMARY

[0004] There is a limited number of antibiotic resistance genes/antibiotics available for use in eukaryotic (e.g., mammalian) cells, thus selection schemes for identifying cells containing multiple transgenes are limited. Not only is there a limited number of distinct genes that confer antibiotic resistance in eukaryotic cells, but simultaneous use of as few as three different antibiotic resistance genes can adversely affect the health of transgenic cells. While antibiotic selection can be performed serially, this process is time-consuming. These limitations on selections schemes for identifying transgenic cells are problematic when there is a need to identify cells into which multiple transgenes have been introduced (e.g., to generate a transgenic organism, e.g., animal model, such as a mouse model).

[0005] Provided herein are methods, compositions and kits useful for the production and/or identification of, for example, cells and/or organisms harboring two or more transgenes (e.g., double-transgenics, triple-transgenics, etc.). For example, the compositions and kits may be used for the production and/or identification of cells and/or organisms harboring two, three, or four transgenes. This technology is based, at least in part, on a protein splicing mechanism initiated by an intein auto-processing domain, which facilitates the joining (conjugation) specifically in multi-transgenic cells of multiple (e.g., two, three, or four) separate selectable marker protein fragments (double-transgenic cells, triple-transgenic cells, or quadruple-transgenic cells). Joining of the two, three, four, or more separate selectable marker protein fragments in the multi-transgenic cells produces a full-length selectable marker protein that confers, for example, antibiotic resistance (an antibiotic resistance protein) or is capable of fluorescence under an appropriate wavelength of light (fluorescent protein). Cells expressing a full-length antibiotic resistance gene survive in the presence of the corresponding antibiotic and thus are selected as multi-transgenic (e.g., double-transgenic, triple-transgenic, or quadruple-transgenic) cells. Likewise, cells expressing a full-length functioning fluorescent protein fluoresce under the appropriate wavelength of light and thus are selected as multi-transgenic (e.g., double-transgenic, triple-transgenic, or quadruple-transgenic) cells.

[0006] Thus, the present disclosure provides, in some embodiments, methods comprising delivering to a composition comprising eukaryotic cells two or more vectors, wherein each vector comprises (i) a nucleotide sequence encoding a selectable marker protein fragment linked to an N-terminal intein protein fragment and/or a C-terminal intein protein fragment and (ii) a nucleotide sequence encoding a molecule of interest, wherein the intein protein fragments, when joined in frame to form full-length function proteins, catalyze joining of the selectable marker protein fragments to produce a full-length selectable marker protein. For example, when two vectors are delivered to a population of cells (e.g., under transfection conditions), some cells will take up the first vector (the vector is introduced in the cells), some cells will take up the second vector, and some cells will take up both vectors. Only those cells that take up both vectors are capable of expressing a full-length functioning selectable marker protein, thus only those cells are selected as double-transgenic cells.

[0007] In some embodiments, methods herein comprising delivering to a composition comprising eukaryotic cells (a) a first vector comprising (i) a nucleotide sequence encoding a first selectable marker protein fragment (e.g., antibiotic resistance protein fragment or fluorescent protein fragment) upstream from a nucleotide sequence encoding an N-terminal intein protein fragment and (ii) a nucleotide sequence encoding a first molecule, and (b) a second vector comprising (i) a nucleotide sequence encoding a C-terminal intein protein fragment upstream from a second selectable marker protein fragment (e.g., antibiotic resistance protein fragment or fluorescent protein fragment) and (ii) a nucleotide sequence encoding a second molecule, wherein the N-terminal intein protein fragment and the C-terminal intein protein fragment catalyze joining of the first selectable marker protein fragment to the second selectable marker protein fragment to produce a full-length selectable marker protein. When the two vectors are delivered to a population of cells (e.g., under transfection conditions), some cells will take up the first vector (the vector is introduced in the cells), some cells will take up the second vector, and some cells will take up both vectors. Only those cells that take up both vectors are capable of expressing a full-length functioning selectable marker protein, thus only those cells are selected as double-transgenic cells.

[0008] In other embodiments, methods comprise delivering to eukaryotic cells (a) a first vector comprising (i) a nucleotide sequence encoding an N-terminal fragment of a selectable marker protein (e.g., antibiotic resistance protein or fluorescent protein), which is upstream from a nucleotide sequence encoding an N-terminal fragment of a first intein and (ii) a nucleotide sequence encoding a first molecule of interest, (b) a second vector comprising (i) a nucleotide sequence encoding a C-terminal fragment of the first intein, which is upstream from a nucleotide sequence encoding a central fragment of the selectable marker protein, which is upstream from a nucleotide sequence encoding an N-terminal fragment of a second intein and (ii) a nucleotide sequence encoding a second molecule of interest, and (c) a third vector comprising (i) a nucleotide sequence encoding a C-terminal fragment of the second intein, which is upstream from a nucleotide sequence encoding a C-terminal fragment of the selectable marker protein and (ii) a nucleotide sequence encoding a third molecule of interest, wherein the N-terminal fragment and the C-terminal fragment of the first intein catalyze joining of N-terminal fragment of the selectable marker protein to the central fragment of the selectable markerprotein, and the N-terminal fragment and the C-terminal fragment of the second intein catalyze joining of central fragment of the selectable markerprotein to the C-terminal fragment of the selectable markerprotein, to produce a full-length selectable markerprotein. When the three vectors are delivered to a population of cells (e.g., under transfection conditions), some cells will take up the first vector (the vector is introduced in the cells), some cells will take up the second vector, some cells will take up the third vector, some cells will take up two different vectors, and some cells will take up all three vectors. Only those cells that take up all three vectors are capable of expressing a full-length functional selectable marker protein, thus only those cells are selected as triple-transgenic cells.

[0009] In still other embodiments, methods comprise delivering to eukaryotic cells (a) a first vector comprising (i) a nucleotide sequence encoding an N-terminal fragment of a selectable marker protein (e.g., antibiotic resistance protein or fluorescent protein), which is upstream from a nucleotide sequence encoding an N-terminal fragment of a first intein and (ii) a nucleotide sequence encoding a first molecule of interest, (b) a second vector comprising (i) a nucleotide sequence encoding a C-terminal fragment of the first intein, which is upstream from a nucleotide sequence encoding a first central fragment of the selectable marker protein, which is upstream from a nucleotide sequence encoding an N-terminal fragment of a second intein and (ii) a nucleotide sequence encoding a second molecule of interest, (c) a third vector comprising (i) a nucleotide sequence encoding a C-terminal fragment of the second intein, which is upstream from a nucleotide sequence encoding a second central fragment of the selectable marker protein, which is upstream from a nucleotide sequence encoding an N-terminal fragment of a third intein and (ii) a nucleotide sequence encoding a third molecule of interest, and (d) a fourth vector comprising (i) a nucleotide sequence encoding a C-terminal fragment of the third intein, which is upstream from a nucleotide sequence encoding a C-terminal fragment of the selectable marker protein and (ii) a nucleotide sequence encoding a third molecule of interest, wherein the N-terminal fragment and the C-terminal fragment of the first intein catalyze joining of N-terminal fragment of the selectable marker protein to the first central fragment of the selectable marker protein, the N-terminal fragment and the C-terminal fragment of the second intein catalyze joining of first central fragment of the selectable marker protein to the second central fragment of the selectable marker protein, the N-terminal fragment and the C-terminal fragment of the third intein catalyze joining of second central fragment of the selectable marker protein to the C-terminal fragment of the selectable marker protein to produce a full-length selectable marker protein. When the four vectors are delivered to a population of cells (e.g., under transfection conditions), some cells will take up the first vector (the vector is introduced in the cells), some cells will take up the second vector, some cells will take up the third vector, some will take up the fourth vector, some cells will take up two different vectors, some cells will take up three different vectors, and some will take up all four vectors. Only those cells that take up all four vectors are capable of expressing a full-length functional selectable marker protein, thus only those cells are selected as quadruple-transgenic cells.

[0010] It should be understood that any one embodiment described herein, including those only disclosed in the examples or one section of the specification, is intended to be able to combine with any one or more other embodiments unless explicitly disclaimed.

### BRIEF DESCRIPTION OF THE DRAWINGS

[0011] FIGS. 1A-1B. Split selectable marker for antibiotic co-selection of two separate transgenic vectors. (FIG. 1A) The coding sequence of a selectable marker is split into an N-terminal fragment (MarN) and a C-terminal fragment (kerC) and separately cloned upstream of an N-terminal fragment of a split intein (IntN) and downstream of a C-terminal fragment of the split intein (IntC), respectively, on two different vectors each carrying a different transgene. These vectors are delivered to cells yielding sub-populations of cells containing either one of the vectors or both of the vectors. Only in cells with both vectors expressing the two intein-split selectable marker fragments (“markertrons”) undergo protein trans-splicing to reconstitute a full-length selectable marker, allowing specific selection and enrichment of the double transgenic cells. (FIG. 1B) To screen for split points compatible for inteins for an antibiotic resistance gene, we identified potential split points according to the junctional requirement for the type of intein tested, then cloned the corresponding N-terminal and C-terminal fragments to the split intein scaffolds on lentiviral vectors equipped with TagBFP2 or mCherry fluorescent proteins, which serve as our test transgenes to evaluate selection efficiency. These are delivered into cells via lentiviral transduction. The cells were then split into replicate plates, one subjected to antibiotic selection while the other maintained in non-selective media. Following antibiotic selection, the replicate cultures were analyzed by flow cytometry.

[0012] FIGS. 2A-2F. Details of the split points of Intein-split resistance (Intres) genes (also referred to as selectable marker genes) and plasmids. (FIG. 2A) Split points for hygromycin resistance protein (SEQ ID NO: 1). Amino acid sequence of hygromycin resistance protein is presented with clouds labeling the split points characterized in this study. Within the label, the top row indicates the plasmid numbers corresponding to Table 1. The bottom row indicates the residue number of the last amino acid in the N-terminal fragment, the species of the intein used, and the residue number of the first amino acid in the C-terminal fragment. “\hat{ }C” indicates an insertion of a Cysteine. (FIG. 2B) Split points for puromycin resistance protein (SEQ ID NO: 2). Amino acid sequence of puromycin resistance protein is presented with clouds labeling the split points characterized in this study. Within the label, the top row indicates the plasmid numbers corresponding to Table 1. The bottom row indicates the residue number of the last amino acid in the N-terminal fragment, the species of the intein used, and the residue number of the first amino acid in the C-terminal fragment. “\hat{ }C” indicates an insertion of a Cysteine. (FIG. 2C) Split points for neomycin resistance protein (SEQ ID NO: 3). Amino acid sequence of neomycin resistance gene is presented with clouds labeling the split points characterized in this study. Within the label, the top row indicates the plasmid numbers corresponding to Table 1. The bottom row indicates the residue number of the last amino acid in the N-terminal fragment, the species of the intein used, and the residue number of the first amino acid in the C-terminal fragment. (FIG. 2D) Split points for blasticidin resistance protein (SEQ ID NO: 4). Amino acid sequence of blasticidin resistance gene is presented with clouds labeling the split points characterized in this study. Within the label, the top row indicates the plasmid numbers corresponding to Table 1. The bottom row indicates the residue number of the last amino acid in the N-terminal fragment, the species of the intein used, and the residue number of the first amino acid in the C-terminal fragment. (FIG. 2E) Split points for green fluorescent protein (SEQ ID NO: 5). (FIG. 2F) Split points for mScarlet fluorescent protein (SEQ ID NO: 6). Amino acid sequence of mScarlet gene is presented with clouds labeling the split points characterized in this study. Within the label, the top row indicates the plasmid numbers corresponding to Table 1. The bottom row indicates the residue number of the last amino acid in the N-terminal fragment, the species of the intein used, and the residue number of the first amino acid in the C-terminal fragment. “\hat{ }C” indicates an insertion of a Cysteine.

[0013] FIG. 3. 2-markertron hygromycin (Hygro) intein-split resistance (Intres) genes. Top schematic shows the split points tested for hygromycin resistance gene. The last residue of the N-terminal fragment is indicated on top of the lollipops. Circle lollipops represent split points using NpuDnaE intein while square lollipops represent those using SspDnaB intein. Crossed-out and shaded lollipops indicate split pairs that failed to endow cells with hygromycin resistance. The column plot below shows the percentage of double-transgenic cells (BFP+ mCherry+) in the non-selected (white columns) and the selected cultures (blue columns) analyzed by flow cytometry.

[0014] FIG. 4. 2-markertron puromycin (Puro) Intres genes. Top schematic shows split points tested for puromycin resistance genes while bottom column plots show percentage of double transgenic cells in the non-selected (white columns) and the selected cultures (brown columns).

[0015] FIG. 5. 2-markertron neomycin (Neo) resistance genes. Top schematic shows split points tested for neomycin resistance genes while bottom column plots show percentage of double transgenic cells in the non-selected (white columns) and the selected cultures (orange columns).

[0016] FIG. 6. 2-markertron blasticidin (Blast) Intres genes. Top schematic shows split points tested for blasticidin resistance gene while bottom column plot shows percentages of double transgenic cells in the non-selected (white columns) and the selected (cyan columns) cultures.

[0017] FIGS. 7A-7C. Gateway-compatible lentiviral destination vectors with 2-markertron Intres markers. (FIG. 7A) Gateway-compatible lentiviral destination vector kits for each split Intres marker consists of an N-vector and C-vector. N-vector contains viral LTRs, CAGGS promoter, gateway destination cassette AttL, ccdB gene, chloramphenicol resistance gene that allows LR clonase-mediated recombination of Gateway donor vector carrying transgenes, followed by internal ribosomal entry site (IRES) that allows polycistronic expression of the N-markertron. Similarly, C-vector contains the C-markertron and allows recombination of another transgene. (FIG. 7B) TagBFP2 (as transgene 1) and mCherry (as transgene 2) were cloned into the 2-markertron Intres plasmids by Gateway recombination and delivered to cells by lentiviral transduction, followed by antibiotic selection and flow cytometry analysis. Column plot shows the percentage of BFP+mCherry+ double-positive cell in the selected culture from the 2-markertron hygromycin (Hygro, blue column), puromycin (Puro, brown column), and neomycin (Neo, orange column) experiments versus their corresponding non-selective cultures (white columns). (FIG. 7C) NLS-GFP (as transgene 1) that labels nucleus with GFP fluorescence and lifeAct-mScarlet (as transgene 2) that labels F-actin with mScarlet fluorescence were recombined into lentiviral vectors expressing full non-split hygromycin resistance gene or lentiviral vectors with 2-markertron hygromycin Intres genes and used to transduce U2OS cells to make dual-label cells. Representative fluorescence microscopic images show GFP, mScarlet and merged channels of cells after hygromycin selection for two weeks.

[0018] FIGS. 8A-8C. Split mScarlet for fluorescence-mediated co-selection of two separate transgenic vectors. (FIG. 8A) 2-markertron mScarlet proteins. Top schematics shows the split points tested for mScarlet. The last residue of the N-terminal fragment is indicated on top of the lollipops. (FIG. 8B) To screen for NpuDnaE intein-compatible split points for mScarlet, we identified potential split points according to the junctional requirement for NpuDnaE intein, then cloned the corresponding N-terminal and C-terminal fragments to the split inteins scaffolds on lentiviral vectors equipped with TagBFP2 or EGFP fluorescent proteins, which serve as our test transgenes to evaluate the selection efficiency. These are delivered into cells via lentiviral transduction. Cells with both lentiviruses contain the necessary protein splicing machinery and mScarlet fragments to reconstitute the full-length mScarlet fluorescent protein, as well as express both TagBFP2 and EGFP transgenes. Cells were subjected to FACS analysis. Boxed schematic shows an example of FACS analysis of the plasmid pair 33+34. P1 population was gated for forward scatter and side scatter for live singlet cells. From those, 17.8% of cells are double positive for TagBFP and EGFP transgenes. When the P1 cells were further gated for mScarlet-positive (mCherry channel), 99.4% of cells are double positive for TagBFP and EGFP. (FIG. 8C) The column plot below shows the percentage of mScarlet-positive cells of each of the indicated split points. The column plot above shows the percentage of TagBFP+ EGFP+ cells among the P1 cells (white columns) and the mScarlet-positive subset of P1 cells (red columns).

[0019] FIGS. 9A-9D. Multi-split selectable markers for co-selection of three or more transgenic vectors. (FIG. 9A) A selectable marker is partitioned into three fragments (M₁, M₂ and M₃). The first marker fragment (M₁) is fused upstream of the N-terminal fragment of the first split intein (I_{N1}). The second marker fragment (M₂) is fused downstream of the C-terminal fragment of the first split intein (I_{C1}) and upstream of the N-terminal fragment of the second split intein (I_{N2}). The third marker fragment (M₃) is fused downstream of the C-terminal fragment of the second split intein (I_{C2}). The first split intein catalyzes the joining of M₁ to M₂ while the second split intein catalyzes the joining of M₂ to M₃, effectively reconstituting the full selectable marker. (FIG. 9B) A design of a k-split selectable marker via an “intein chain” mechanism. Similar to the 3-split scenario, the selectable marker is partitioned into k fragments, and are reconstituted through protein trans-splicing mediated by intervening split inteins. (FIG. 9C) Split points identified from 2-split selectable markers were used in combination to produce 3-split selectable markers. The corresponding fragments were cloned into lentiviral vectors to result in the 3-split selectable marker structure and a reporter fluorescent transgene per vector. Cells were then transduced with viruses prepared from these vectors, split into selective or non-selective media. After appropriate selection period, the cultures were analyzed by flow cytometry. (FIG. 9D) 3-markertron hygromycin (Hygro) Intres. Top schematics shows the split points tested for hygromycin resistance gene, with residue numbers of the last amino acid of the N-terminal fragments indicated above circle or square lollipops, representing NpuDnaE and SspDnaB inteins, respectively. Six 3-markertron hygromycin Intreses were tested, each indicated with a numbered line with circle or square indicating the two split points used for each case. Column plot below shows the percentage of triple transgenic (BFP+ GFP+ mCherry+) cells from the non-selective (white columns) and selective (blue columns) cultures for the 3-markertron hygromycin Intres indicated by the numbers below.

[0020] FIGS. 10A-10C. Gateway-compatible lentiviral destination vectors with 3-markertron hygromycin Intres genes. (FIG. 10A) Gateway-compatible lentiviral destination vector with viral LTRs, CAGGS promoter, gateway destination cassette AttL, ccdB gene, chloramphenicol resistance gene that allows LR clonase-mediated recombination of Gateway donor vector carrying transgenes, followed by internal ribosomal entry site (IRES) that allows polycistronic expression of the each of the three 3-split hygromycin markertrons. (FIG. 10B) TagBFP2 (as transgene 1) and EGFP (as transgene 2) and mCherry (as transgene 3) were cloned into the 3-split Intres plasmids by Gateway recombination and delivered to cells by lentiviral transduction, followed by antibiotic selection and flow cytometry analysis. (FIG. 10C) Column plot shows the percentage of BFP+GFP+mCherry+ triple-positive cells in the hygromycin selected (blue columns) versus their corresponding non-selective cultures (white columns).

[0021] FIG. 11. Four-split Hygro intres. (a) Markertrons of 4-split hygro intres expressed by four different plasmids. Plasmid 115 expresses a markertron created by fusing amino acid 1˜89 of Hygromycin resistance gene [Hygro(1-89)] to NpuDnaE(N) and a leuzine Zipper A motif (LZA). Plasmid 116 expresses a markertron created by fusing, from N- to C-termini, Leucine Zipper B motif (LZB)-NpuDnaGEP(C), Hygro(90-200) and SspDnaB(N). Plasmid 117 expresses a markertron created by fusing, from N- to C-termini, SspDnaB(C), Hygro(201-240), NpuDnaE(N)-LZA. Plasmid 118 expresses a markertron created by fusing LZB-NpuDnaGEP(C) to Hygro(241-341).

[0022] FIGS. 12A-12E. Intres markers allow enrichment of biallelic targeted cells from CRISPR/Cas-mediated knock-in experiments. Targeting construct pairs containing homology arms for AAVS1 safe harbor locus were designed to contain full length (FL) non-split or split Intres markers and tested for ability to enrich for biallelic targeted cells via antibiotic selection. (FIG. 12A) Plasmids 107 and 108 contains FL Neomycin (Neo) resistance gene driven by endogenous PPP1R12C promoter at the AAVS1 locus, FL Hygromycin (Hygro) gene and rtTA Dox-responsive transactivator driven by an EF1a promoter, as well as FL Blasticidin (Blast) expressed as well as EGFP (plasmid 107) and mScarlet (plasmid 108) from a dox-inducible TetO promoter. Plasmid 106 contains Cas9 and an sgRNA targeting the AAVS locus. 2A: self-cleaving 2A peptides. Plasmids 106, 107 and 108 were co-transfected into HEK293T cells, split, and passaged in dox-containing hygromycin, blasticidin or non-selective media for two weeks, and analyzed by flow cytometry to assay efficiency of biallelic targeting. (FIG. 12B) Plasmids 109 and 110 contain similar structure as Plasmids 107 and 108, but having split Blast Intres in place of the FL Blast. (FIG. 12C) Plasmids 111 and 112 contain an EF1a-driven FL Blast and TetO-driven FL Hygro, nitroreductase (NTR), fluorescent protein (EGFP or mCherry) separated by 2A peptides. (FIG. 12D) Plasmids 113 and 114 are similar to Plasmids 111 and 112 but with Hygro Intres in place of FL Hygro. (FIG. 12E) Flow cytometry analysis of cells transfected with Plasmid 106 (Cas9+AAVS-sgRNA) and the indicated targeting construct pairs, two weeks after culturing in dox-containing non-selective media (Selection: None), blasticidin selection media (Blast) and hygromycin selection media (Hygro).

### DETAILED DESCRIPTION

[0023] Provided herein, in some aspects, are methods of producing transgenic (e.g., multi-transgenic, such as double transgenic or triple transgenic) organisms, into which more than one transgene (or other genetic element) is introduced. As shown in FIG. 1A, an exemplary method of the present disclosure comprises delivering to a population of cells (a) a vector encoding a first selectable marker protein fragment upstream from an N-terminal intein protein fragment and a first transgene of interest, and (b) another vector encoding a C-terminal intein protein fragment upstream from a second selectable marker protein fragment and a second (e.g., a different) transgene of interest. Some cells of the population will take up a single vector (carrying only a fragment of the intein, a fragment of the selectable marker protein, and a single transgene), while other cells of the population will take up both vectors (and thus both intein fragments, both selectable marker protein fragments, and both transgenes of interest). In cells that take up both vectors, following translation, the intein protein fragments spontaneously and non-covalently assemble (cooperatively fold) into an intein structure to catalyze joining of the first selectable marker protein fragment to the second selectable marker protein fragment to produce a full-length selectable marker protein, which enables specific selection of those double transgenic cells. For example, if the selectable marker protein is an antibiotic resistance protein, only double-transgenic cells expressing the full-length (functional) antibiotic resistance protein will survive selection in the present of the particular antibiotic. If the selectable marker protein is a fluorescent protein, as another example, only double-transgenic cells expressing the full-length (functional) fluorescent protein will emit a detectable signal such that only those signal-emitting cells are selected.

[0024] Another exemplary method of the present disclosure comprises delivering to a population of cells (a) a first vector comprising (i) a nucleotide sequence encoding an N-terminal fragment of an antibiotic resistance protein, which is upstream from a nucleotide sequence encoding an N-terminal fragment of a first intein and (ii) a nucleotide sequence encoding a first molecule of interest, (b) a second vector comprising (i) a nucleotide sequence encoding a C-terminal fragment of the first intein, which is upstream from a nucleotide sequence encoding a central fragment of the antibiotic resistance protein, which is upstream from a nucleotide sequence encoding an N-terminal fragment of a second intein and (ii) a nucleotide sequence encoding a second molecule of interest, and (c) a third vector comprising (i) a nucleotide sequence encoding a C-terminal fragment of the second intein, which is upstream from a nucleotide sequence encoding a C-terminal fragment of the antibiotic resistance protein and (ii) a nucleotide sequence encoding a third molecule of interest. Some cells of the population will take up a single vector (carrying only a fragment of the intein, a fragment of the selectable marker protein, and a single transgene), while other cells of the population will take up two vectors or all three vectors (and thus all intein fragments, all selectable marker protein fragments, and all transgenes of interest). In cells that take up all three vectors, following translation, the intein protein fragments spontaneously and non-covalently assemble (cooperatively fold) into an intein structure to catalyze joining of the N-terminal fragment of the selectable marker protein to the central fragment, and the central fragment to the C-terminal fragment of the selectable marker protein to produce a full-length selectable marker protein, which enables specific selection of those triple-transgenic cells. For example, if the selectable marker protein is an antibiotic resistance protein, only triple-transgenic cells expressing the full-length (functional) antibiotic resistance protein will survive selection in the present of the particular antibiotic. If the selectable marker protein is a fluorescent protein, as another example, only triple-transgenic cells expressing the full-length (functional) fluorescent protein will emit a detectable signal such that only those signal-emitting cells are selected.

### Inteins

[0025] An intein (intervening protein) carries out a unique auto-processing event known as protein splicing in which it excises itself out from a larger precursor polypeptide through the cleavage of two peptide bonds and, in the process, ligates the flanking extein (external protein) sequences through the formation of a new peptide bond. This rearrangement occurs post-translationally (or possibly co-translationally), as intein genes are found embedded in frame within other protein-coding genes. Furthermore, intein-mediated protein splicing is spontaneous; it requires no external factor or energy source, only the folding of the intein domain. In nature, the precursor protein contains three segments—an N-extein (N-terminal portion of the protein) followed by the intein followed by a C-extein (C-terminal portion of the protein). Following splicing, the resulting protein contains the N-extein linked to the C-extein.

[0026] There are two types of inteins: cis-splicing inteins are single polypeptides that are embedded in a host protein, whereas trans-splicing inteins (referred to as split inteins) are separate polypeptides that mediate protein splicing after the intein pieces and their protein cargo associate (see, e.g., Paulus, H Annu Rev Biochem 69:447-496 (2000); and Saleh L, Perler F B Chem Rec 6:183-193 (2006)). Split inteins catalyze a series of chemical rearrangements that require the intein to be properly assembled and folded. The first step in splicing involves an N—S acyl shift in which the N-extein polypeptide is transferred to the side chain of the first residue of the intein. This is then followed by a trans-(thio)esterification reaction in which this acyl unit is transferred to the first residue of the C-extein (which is either serine, threonine, or cysteine) to form a branched intermediate. In the penultimate step of the process, this branched intermediate is cleaved from the intein by a transamidation reaction involving the C-terminal asparagine residue of the intein. This then sets up the final step of the process involving an S—N acyl transfer to create a normal peptide bond between the two exteins (Lockless, S W, Muir, T W PNAS 106(27): 10999-11004 (2009)).

[0027] To date, there are at least 70 different intein alleles, distinguished not only by the type of host gene in which the inteins are embedded, but also the integration point within that host gene (Perler, F B Nucleic Acids Res. 30: 383-384 (2002); Pietrokovski, S Trends Genet. 17: 465-472 (2001)). A small fraction (less than 5%) of the identified intein genes encode split inteins. Unlike the more common contiguous inteins, split inteins are transcribed and translated as two separate polypeptides, the N-intein and C-intein, each fused to one extein. Upon translation, the intein fragments spontaneously and non-covalently assemble (cooperatively fold) into the canonical intein structure to carry out protein splicing in trans. The first two split inteins to be characterized, from the cyanobacteria Synechocystis species PCC6803 (Ssp) and Nostoc punctiforme PCC73102 (Npu), are orthologs naturally found inserted in the a subunit of DNA Polymerase III (DnaE). Npu is especially notable due its remarkably fast rate of protein trans-splicing (t_{1/2}=50 s at 30° C.). This half-life is significantly shorter than that of Ssp (t_{1/2}=80 min at 30° C.) (Shah, N H et al. J. Am. Chem. Soc. 135: 5839 (2013)).

[0028] Herein, split inteins are used to catalyze the joining of two fragments (e.g., an N-terminal fragment and a C-terminal fragment) of a selectable marker protein, such as an antibiotic resistance protein or a fluorescent protein to produce a functional, full-length protein (e.g., FIGS. 1A and 1B).

[0029] A split intein may be a natural split intein or an engineered split intein. Natural split inteins naturally occur in a variety of different organisms. The largest known family of split inteins is found within the DnaE genes of at least 20 cyanobacterial species (Caspi J, et al. Mol. Microbiol. 50: 1569-1577 (2003)). Thus, in some embodiments of the present disclosure, a natural split intein is selected from DnaE inteins. Non-limiting examples of DnaE inteins include Synechocystis sp. DnaE (SspDnaE) inteins and Nostoc punctiforme (NpuDnaE) inteins.

[0030] In some embodiments, a split intein is an engineered split intein. Engineered split inteins may be produced from contiguous inteins (where a contiguous intein is artificially split) or may be modified natural split inteins that, for example, promote efficient protein purification, ligation, modification and cyclization (e.g., NpuGEP and CfaGEP, as described by Stevens, A J PNAS 114(32): 8538-8543 (2017)). Methods for engineering split inteins are described, for example, by Aranko, A S et al. Protein Eng Des Sel. 27(8): 263-271 (2014), incorporated herein by reference. In some embodiments, the engineered split intein is engineered from DnaB inteins (Wu, H, et al. Biochim Biophys Acta 1387(1-2): 422-432 (1998)). For example, the engineered split intein may be a SspDnaB S1 intein. In some embodiments, the engineered split intein is engineered from GyrB inteins. For example, the engineered split intein may be a SspGyrB S11 intein.

[0031] In some embodiments, wherein triple-transgenics are produced, for example, the first intein may be the same as the second intein (e.g., both DnaE inteins). In other embodiments, two different inteins may be used (e.g., a DnaE intein and a DnaB intein). In some embodiments, the first intein is a NpuDnaE intein and the second intein is a NpuDnaE intein.

### Selectable Marker Proteins

[0032] Transgenic (e.g., double and/or triple transgenic) cells of the present disclosure are selected based on their expression of a full-length selectable marker protein. A selectable marker protein, generally, confers a trait suitable for artificial selection. Examples of selectable marker proteins include antibiotic resistance proteins and fluorescent proteins.

[0033] An antibiotic resistance gene is a gene encoding a protein that confers resistance to a particular antibiotic or class of antibiotics. Non-limiting examples of antibiotic resistance genes for use in eukaryotic cells include those encoding proteins that confer resistance to hygromycin, G418, puromycin, phleomycin D1 or blasticidin. Non-limiting examples of antibiotic resistance genes for use in prokaryotic cells include those encoding proteins that confer resistance to hygromycin, G418, puromycin, phleomycin D1, blasticidin, kanamycin, spectinomycin, streptomycin, ampicillin, carbenicillin, bleomycin, erythromycin, polymyxin D, tetracycline and chloramphenicol.

[0034] Hygromycin B is an antibiotic produced by the bacterium Streptomyces hygroscopicus. It is an aminoglycoside that kills bacteria, fungi and higher eukaryotic cells by inhibiting protein synthesis. Hygromycin phosphotransferase (HPT), encoded by the hpt gene (also referred to as the hph or aphIV gene) originally derived from Escherichia coli, detoxifies the aminocyclitol antibiotic hygromycin B. Thus, in some embodiments, the selectable marker gene of the present disclosure is the hpt gene.

[0035] G418 (GENETICIN®) is an aminoglycoside antibiotic similar in structure to gentamicin B 1. It is produced by Micromonospora rhodorangea. G418 blocks polypeptide synthesis by inhibiting the elongation step in both prokaryotic and eukaryotic cells. Resistance to G418 is conferred by the neo gene from Tn5 encoding an aminoglycoside 3′-phosphotransferase, APT 3′ II. G418 is an analog of neomycin sulfate, and has similar mechanism as neomycin. Thus, in some embodiments, the selectable marker gene of the present disclosure is the neo gene.

[0036] Puromycin is an aminonucleoside antibiotic, derived from Streptomyces alboniger, that causes premature chain termination during translation taking place in the ribosome. Puromycin is selective for either prokaryotes or eukaryotes. Resistance to puromycin is conferred through expression of the puromycin N-acetyl-transferase (pac) gene. Thus, in some embodiments, the selectable marker gene of the present disclosure is the pac gene.

[0037] Phleomycin D1 (e.g., ZEOCIN®) is a glycopeptide antibiotic and one of the phleomycins from Streptomyces verticillus belonging to the bleomycin family of antibiotics. It is a broad-spectrum antibiotic that is effective against most bacteria, filamentous fungi, yeast, plant, and animal cells. It causes cell death by intercalating into DNA and induces double strand breaks of the DNA. Resistance to phleomycin D1 is conferred by the product of the Sh ble gene first isolated from Streptoalloteichus hindustanus. Thus, in some embodiments, the selectable marker gene of the present disclosure is the Sh ble gene.

[0038] Blasticidin S is an antibiotic that is produced by Streptomyces griseochromogenes. Blasticidin prevents the growth of both eukaryotic and prokaryotic cells by inhibiting termination step of translation and peptide bond formation (to lesser extent) by the ribosome. Resistance to blasticidin is conferred by at least three different genes: bls (an acetyltransferase) from Streptoverticillum spp.; bsr (a blasticidin-S deaminase) from Bacillus cereus (other bsr genes are known as well); and bsd (another deaminase) from Aspergillus terreus. Thus, in some embodiments, the selectable marker gene of the present disclosure is the bls gene, the bsr gene, or the bsd gene.

[0039] Non-limiting examples of fluorescent proteins that may be used as provided herein include TagCFP, mTagCFP2, Czurite, ECFP2, mKalama1, Sirius, Sapphire, T-Sapphire, ECFP, Cerulean, SCFP3C, mTurquoise, mTurquoise2, monomeric Midoriishi-Cyan, TagCFP, mTFP1, EGFP, Emerald, Superfolder GFP, Monomeric Czami Green, TagGFP2, mUKG, mWasabi, Clover, mNeonGreen, EYFP, Citrine, Venus, SYFP2, TagYFP, Monomeric Kusabira-Orange, mKOK, mKO2, mOrange, mOrange2, mRaspberry, mCherry, mStrawberry, mScarlet, mTangerine, tdTomato, TagRFP, TagRFP-T, mCpple, mRuby, mRuby2, mPlum, HcRed-Tandem, mKate2, mNeptune, NirFP, TagRFP657, IFP1.4 and iRFP.

[0040] Full-length selectable marker genes, in some embodiments, are produced by joining in the same cell two selectable marker gene fragments. In some embodiments, with reference to any full-length protein, one of the fragments is an N-terminal fragment (N-extein), while the other fragment is a C-terminal fragment (C-extein). Thus, in some embodiments, a first antibiotic resistance protein fragment is an N-terminal antibiotic resistance protein fragment, and a second antibiotic resistance protein fragment is a C-terminal antibiotic resistance protein fragment. In other embodiments, a first fluorescent protein fragment is an N-terminal fluorescent protein fragment, and a second fluorescent protein fragment is a C-terminal fluorescent protein fragment.

[0041] In other embodiments, full-length selectable marker genes are produced by joining in the same cell three or more selectable marker gene fragments. In some embodiments, with reference to any full-length protein, one of the fragments is an N-terminal fragment, one or more (e.g., 1, 2, or 3) of the fragments is a central fragment, and one of the fragments is a C-terminal fragment.

[0042] An N-terminal fragment may be any protein fragment that includes the free amine group (—NH2) of the full-length protein. A C-terminal fragment may be any protein fragment that includes the free carboxyl group (—COOH). A central fragment may be any protein fragment that is located between the N-terminal fragment and the C-terminal fragment of the full-length protein.

[0043] For example, amino acids 1-89 of the gene encoding hygromycin (a 341-amino acid protein) may be referred to as the N-terminal protein fragment, while amino acids 90-341 may be referred to as the C-terminal fragment. Similarly, with reference to FIG. 5, amino acids 1-200 of the gene encoding hygromycin may be referred to as the N-terminal protein fragment, while amino acids 201-341 may be referred to as the C-terminal fragment. FIG. 6 shows additional examples where amino acids 1-53, 1-240, or 1-292 are considered the N-terminal protein fragments of full length hygromycin containing amino acids 54-341, 241-341, or 293-341 as the respective C-terminal fragments.

[0044] As another example, amino acids 1-52 of the gene encoding hygromycin (a 341-amino acid protein) may be referred to as the N-terminal protein fragment, amino acids 53-89 may be referred to as the central protein fragment, and amino acids 90-341 may be referred to as the C-terminal fragment. Similarly, amino acids 1-89 of the gene encoding hygromycin may be referred to as the N-terminal protein fragment, amino acids 90-240 may be referred to as the central fragment, and amino acids 241-341 may be referred to as the C-terminal fragment.

### Transgenes and Other Molecules of Interest

[0045] The methods and compositions of the present disclosure are used, in some embodiments, to produce multi-transgenic (e.g., double and/or triple transgenic) cells and/or organisms. Thus, in some embodiments, the methods use one vector that encodes a first molecule (a first molecule of interest) and another vector that encodes a second molecule (a second molecule of interest). In some embodiments, the methods use yet another vector that encodes a third molecules of interest. Additional vectors (e.g., encoding additional central fragments of a selectable marker protein) may encode additional molecules of interest. Molecules of interest may be, for example, polypeptides (e.g., proteins and peptides) or polynucleotides (e.g., nucleic acids, such as DNA or RNA).

[0046] In some embodiments, the first molecule (e.g., located on the first vector) is a protein. In some embodiments, the second molecule (e.g., located on the second vector) is a protein. In some embodiments, the third molecule (e.g., located on the third vector) is a protein. Examples of proteins of interest include, but are not limited to, enzymes, cytokines, transcription factors, hormones, growth factors, blood factors, antigens and antibodies.

[0047] In some embodiments, the first molecule is a peptide. In some embodiments, the second molecule is a peptide. In some embodiments, the third molecule is a peptide.

[0048] In some embodiments, the first molecule is a messenger RNA (mRNA). In some embodiments, the second molecule is a mRNA. In some embodiments, the third molecule is a mRNA. The mRNA, in some embodiments, encodes a vaccine or other antigenic molecule.

[0049] In some embodiments, the first molecule is a non-coding RNA (a RNA that does not encode a protein). In some embodiments, the second molecule is a non-coding RNA. In some embodiments, the third molecule is a non-coding RNA. Examples of non-coding RNA include, but are not limited to, RNA interference molecules, such as microRNA (miRNA), antisense RNA, short-interfering RNA (siRNA) or short-hairpin RNA (shRNA).

### Vectors

[0050] Methods of the present disclosure include the use of at least two or at least three different vectors. A vector is any nucleic acid that may be used as a vehicle to carry exogenous (foreign) genetic material into a cell. A vector, in some embodiments, is a DNA sequence that includes an insert (e.g., transgene) and a larger sequence that serves as the backbone of the vector. Non-limiting examples of vectors include plasmids, viruses/viral vectors, cosmids, and artificial chromosomes, any of which may be used as provided herein. In some embodiments, the vector is a viral vector, such as a viral particle. In some embodiments, the vector is an RNA-based vector, such as a self-replicating RNA vector. In some embodiments, the first vector is a plasmid, the second vector is a plasmid, and/or the third vector is a plasmid. A vector, as provided herein, includes a promoter operably linked to a nucleic acid encoding a fragment of an intein and a fragment of selectable marker protein. In some embodiments, a vector also comprises a promoter operably linked to a nucleic acid, such as a transgene, encoding a molecule of interest.

[0051] In some embodiments, one vector (e.g., a first vector) comprises a nucleotide sequence encoding a first selectable marker protein fragment upstream from a nucleotide sequence encoding an N-terminal intein protein fragment, while the other vector (e.g., a second vector) comprises a nucleotide sequence encoding a C-terminal intein protein fragment upstream from a second antibiotic resistance protein fragment (see, e.g., FIG. 1A). This configuration is equivalent to one vector (e.g., a first vector) comprising a nucleotide sequence encoding an N-terminal intein protein fragment downstream from a nucleotide sequence encoding a first selectable marker protein fragment, and the other vector (e.g., a second vector) comprising a second antibiotic resistance protein fragment downstream from a nucleotide sequence encoding a C-terminal intein protein fragment. The terms “upstream” and “downstream” refer to relative positions in a nucleic acid. Each nucleic acid has a 5′ end and a 3′ end, so named for the carbon position on the deoxyribose (or ribose) ring. When considering double-stranded DNA, for example, upstream is toward the 5′ end of the coding strand and downstream is toward the 3′ end.

[0052] In some embodiments, (a) a first vector comprises a nucleotide sequence encoding an N-terminal fragment of an antibiotic resistance protein, which is upstream from a nucleotide sequence encoding an N-terminal fragment of a first intein, (b) a second vector comprises a nucleotide sequence encoding a C-terminal fragment of the first intein, which is upstream from a nucleotide sequence encoding a central fragment of the antibiotic resistance protein, which is upstream from a nucleotide sequence encoding an N-terminal fragment of a second intein, and (c) a third vector comprises a nucleotide sequence encoding a C-terminal fragment of the second intein, which is upstream from a nucleotide sequence encoding a C-terminal fragment of the antibiotic resistance protein. This configuration is equivalent to a (a) a first vector comprising a nucleotide sequence encoding an N-terminal fragment of a first intein, which is downstream from a nucleotide sequence encoding an N-terminal fragment of an antibiotic resistance protein, (b) a second vector comprising a nucleotide sequence encoding an N-terminal fragment of a second intein, which is downstream from a nucleotide sequence encoding a central fragment of the antibiotic resistance protein, which is downstream from a nucleotide sequence encoding a C-terminal fragment of the first intein, and (c) a third vector comprising a C-terminal fragment of the antibiotic resistance protein, which is downstream from a nucleotide sequence encoding a C-terminal fragment of the second intein.

### Cells

[0053] Methods of the present disclosure may be used for the production of transgenic cells and organisms by introducing into host cells the vectors (e.g., first and second vectors) described herein. The cells into which the vectors are introduced may be eukaryotic or prokaryotic. In some embodiments, the cells are eukaryotic. Examples of eukaryotic cells for use as provided herein include mammalian cells, plant cells (e.g., crop cells), inset cells (e.g., Drosophila) and fungal cells (e.g., Saccharomyces). Mammalian cells may be, for example, human cells (stem cells or cells from an established cell line), primate cells, equine cells, bovine cells, porcine cells, canine cells, feline cells, or rodent cells (e.g., mouse or rat). Examples of mammalian cells for use as provided herein include, but are not limited to, Chinese hamster ovary (CHO) cells, human embryonic kidney (HEK) 293 cells, HeLa cells, and NSO cells. In some embodiments, the cells are prokaryotic. Examples of prokaryotic cells for use as provided herein include bacterial cells. Bacterial cells may be, for example, Escherichia spp. (e.g., Escherichia coli), Streptococcus spp. (e.g., Streptococcus pyogenes, Streptococcus viridans, Streptococcus pneumoniae), Neisseria spp. (e.g., Neisseria gibirrhoea, Neisseria meningitidis), Corynebacterium spp. (e.g., Corynebacterium diphtheriae), Bacillis spp. (e.g., Bacillis anthracis, Bacillis subtilis), Lactobacillus spp., Clostridium spp. (e.g., Clostridium tetani, Clostridium perfringens, Clostridium novyii), Mycobacterium spp. (e.g., Mycobacterium tuberculosis), Shigella spp. (e.g., Shigella flexneri, Shigella dysenteriae), Salmonella spp. (e.g., Salmonella typhi, Salmonella enteritidis), Klebsiella spp. (e.g., Klebsiella pneumoniae), Yersinia spp. (e.g., Yersinia pestis), Serratia spp. (e.g., Serratia marcescens), Pseudomonas spp. (e.g., Pseudomonas aeruginosa, Pseudomonas mallei), Eikenella spp. (e.g., Eikenella corrodens), Haemophilus spp. (e.g., Haemophilus influenza, Haemophilus ducreyi, Haemophilus aegyptius), Vibrio spp. (e.g., Vibrio cholera, Vibrio natriegens), Legionella spp. (e.g., Legionella micdadei, Legionella bozemani), Brucella spp. (e.g., Brucella abortus), Mycoplasma spp. (e.g., Mycoplasma pneumoniae) or Streptomyces spp. (e.g. Streptomyces coelicolor, Streptomyces lividans, Streptomyces albus).

### Delivery and Selection Methods

[0054] Methods of the present disclosure, in some embodiments, include delivering vectors to a composition comprising cells and maintaining the composition under conditions that permit introduction of nucleic acid (e.g., first, second, and third vector) into the cells and permit nucleic acid expression in the cells to produce eukaryotic cells. Conditions required for the introduction of nucleic acid (e.g., vectors) into cells are well known. These conditions include, for example, transformation (of prokaryotic cells) conditions, transfection (of eukaryotic cells) conditions, transduction (via virus/viral vector) conditions, and electroporation conditions, any of which may be used as provided herein. Thus, in some embodiments, methods of the present disclosure include transfecting eukaryotic (e.g. mammalian) cells, while in other embodiments, the methods include transforming prokaryotic (e.g., bacterial) cells.

[0055] The selection of transgenic, e.g., multi-transgenic cells, such as double, triple, and/or quarduple transgenic cells depends on the type of selectable marker used. For example, if the selectable marker protein is an antibiotic resistance protein, the selection step may include exposing the cells to a specific antibiotic and selecting only those cells that survive. If the selectable marker protein is a fluorescent protein, the selection step may include simply viewing the cells under a microscope and selecting cells that fluoresce, or the selection step may include other fluorescent selection methods, such as fluorescence-activated cell sorting (FACS) sorting.

[0056] In some embodiments, cells are transduced with viral vectors (e.g., viruses) carrying the nucleic acids as described herein. In some embodiments, prior to transduction (or other transfection method), cells are seeded, for example, on well plates (e.g., 12-well plates) at a density of 1×10⁴ to 1×10⁶ per well. In some embodiments 100 μL to 500 μL, e.g., 100, 150, 200, 250, 300, 350, 400, 450, or 500 μL of each viral vector is added to each well.

### Kits

[0057] The present disclosure also provides kits that may be used, for example, to produce and screen for transgenic cells and/or organisms. The kits may include any two or more components as described herein. For example, a kit may comprise (a) a first vector comprising a nucleotide sequence encoding a first selectable marker protein fragment upstream from a nucleotide sequence encoding an N-terminal intein protein fragment; and (b) a second vector comprising a nucleotide sequence encoding a C-terminal intein protein fragment upstream from a second selectable marker protein fragment, wherein the N-terminal intein protein fragment and the C-terminal intein protein fragment catalyze joining of the first selectable marker protein fragment to the second selectable marker protein fragment to produce a full-length antibiotic resistance protein.

[0058] In some embodiments, the kits include any two or more components as described herein. For example, a kit may comprise (a) a first vector comprising a nucleotide sequence encoding an N-terminal fragment of an antibiotic resistance protein, which is upstream from a nucleotide sequence encoding an N-terminal fragment of a first intein, (b) a second vector comprising a nucleotide sequence encoding a C-terminal fragment of the first intein, which is upstream from a nucleotide sequence encoding a central fragment of the antibiotic resistance protein, which is upstream from a nucleotide sequence encoding an N-terminal fragment of a second intein, and (c) a third vector comprising a nucleotide sequence encoding a C-terminal fragment of the second intein, which is upstream from a nucleotide sequence encoding a C-terminal fragment of the antibiotic resistance protein, wherein the N-terminal fragment and the C-terminal fragment of the first intein catalyze joining of N-terminal fragment of the antibiotic resistance protein to the central fragment of the antibiotic resistance protein, and the N-terminal fragment and the C-terminal fragment of the second intein catalyze joining of central fragment of the antibiotic resistance protein to the C-terminal fragment of the antibiotic resistance protein, to produce a full-length antibiotic resistance protein.

[0059] In some embodiments, the kits further comprise any one or more of the following components: buffers, salts, cloning enzymes (e.g., LR clonase), competent cells (e.g., competent bacterial cells), transfection reagents, antibiotics, and/or instructions for performing the methods described herein.

### ADDITIONAL EMBODIMENTS

[0060] Additional embodiments of the present disclosure are encompassed by the following numbered paragraphs:

1. A method comprising delivering to eukaryotic cells

[0061] (a) a first vector comprising (i) a nucleotide sequence encoding an N-terminal fragment of an antibiotic resistance protein, which is upstream from a nucleotide sequence encoding an N-terminal fragment of an intein and (ii) a nucleotide sequence encoding a first molecule of interest; and

[0062] (b) a second vector comprising (i) a nucleotide sequence encoding a C-terminal fragment of the intein, which is upstream from a C-terminal fragment of the antibiotic resistance protein and (ii) a nucleotide sequence encoding a second molecule of interest,

[0063] wherein the N-terminal fragment and the C-terminal fragment of the intein catalyze joining of the N-terminal fragment and the C-terminal fragment of the antibiotic resistance protein to produce a full-length antibiotic resistance protein.

2. The method of paragraph 1 further comprising maintaining the eukaryotic cells under conditions that permit introduction of the first and second vectors into the eukaryotic cells to produce transgenic eukaryotic cells.
3. The method of paragraph 2 further comprising selecting the transgenic eukaryotic cells that comprise the full-length antibiotic resistance protein.
4. The method of any one of paragraphs 1-3, wherein the eukaryotic cells are mammalian cells.
5. The method of any one of paragraphs 1-4, wherein the antibiotic resistance protein confers resistance to hygromycin, G418, puromycin, phleomycin D1 or blasticidin.
6. The method of any one of paragraphs 1-5, wherein the intein is a split intein.
7. The method of paragraph 6, wherein the split intein is a natural split intein.
8. The method of paragraph 7, wherein the natural split intein is selected from DnaE inteins.
9. The method of paragraph 8, wherein the DnaE inteins are selected from Synechocystis sp. DnaE (SspDnaE) inteins and Nostoc punctiforme (NpuDnaE) inteins.
10. The method of paragraph 6, wherein the split intein is an engineered split intein.
11. The method of paragraph 10, wherein the engineered split intein is engineered from DnaB inteins.
12. The method of paragraph 11, wherein the engineered split intein is a SspDnaB S1 intein.
13. The method of paragraph 12, wherein the engineered split intein is engineered from GyrB inteins.
14. The method of paragraph 13, wherein the engineered split intein is a SspGyrB S11 intein.
15. The method of any one of paragraphs 1-14, wherein the first and/or second molecule is a protein.
16. The method of any one of paragraphs 1-15, wherein the first and/or second molecule is a non-coding ribonucleic acid (RNA).
17. The method of paragraph 16, wherein the non-coding RNA is a microRNA (miRNA), antisense RNA, short-interfering RNA (siRNA) or short-hairpin RNA (shRNA).
18. The method of any one of paragraphs 1-17, wherein the first and/or second vector is a plasmid vector or a viral vector.
19. A method comprising delivering to eukaryotic cells

[0064] (a) a first vector comprising (i) an N-terminal fragment of a hygB gene, which is upstream from a nucleotide sequence encoding an N-terminal fragment of an intein and (ii) a first molecule of interest; and

[0065] (b) a second vector comprising (ii) a nucleotide sequence encoding a C-terminal fragment of the intein, which is upstream from a C-terminal fragment of the hygB gene and (ii) a second molecule of interest,

[0066] wherein the N-terminal fragment and C-terminal fragment of the intein catalyze joining of a protein fragment encoded by the N-terminal fragment of the hygB gene to a protein fragment encoded by the C-terminal fragment of the hygB gene to produce full-length hygromycin B phosphotransferase.

20. The method of paragraph 19, wherein the first amino acid of the protein fragment encoded by the second hygB gene fragment is cysteine.
21. The method of paragraph 23, wherein

[0067] the protein fragment encoded by the N-terminal fragment of the hygB gene comprises an amino acid sequence identified by amino acids 1-89 of SEQ ID NO: 1, and the protein fragment encoded by the C-terminal fragment of the hygB gene comprises an amino acid sequence identified by amino acids 90-341 of SEQ ID NO: 1;

[0068] the protein fragment encoded by the N-terminal fragment of the hygB gene comprises an amino acid sequence identified by amino acids 1-200 of SEQ ID NO: 1, and the protein fragment encoded by the C-terminal fragment of the hygB gene comprises an amino acid sequence identified by amino acids 201-341 of SEQ ID NO: 1;

[0069] the protein fragment encoded by the N-terminal fragment of the hygB gene comprises an amino acid sequence identified by amino acids 1-53 of SEQ ID NO: 1, and the protein fragment encoded by the C-terminal fragment of the hygB gene comprises an amino acid sequence identified by amino acids 54-341 of SEQ ID NO: 1;

[0070] the protein fragment encoded by the N-terminal fragment of the hygB gene comprises an amino acid sequence identified by amino acids 1-240 of SEQ ID NO: 1, and the protein fragment encoded by the C-terminal fragment of the hygB gene comprises an amino acid sequence identified by amino acids 241-341 of SEQ ID NO: 1;

[0071] the protein fragment encoded by the N-terminal fragment of the hygB gene comprises an amino acid sequence identified by amino acids 1-292 of SEQ ID NO: 1, and the protein fragment encoded by the C-terminal fragment of the hygB gene comprises an amino acid sequence identified by amino acids 293-341 of SEQ ID NO: 1.

22. The method of any one of paragraphs 23-21, wherein

[0072] the N-terminal fragment of the intein is identified by SEQ ID NO:16, and the C-terminal fragment of the intein is identified by SEQ ID NO:17;

[0073] the N-terminal fragment of the intein is identified by SEQ ID NO:7, and the C-terminal fragment of the intein is identified by SEQ ID NO:8; or

[0074] the N-terminal fragment of the intein is identified by SEQ ID NO:18 or SEQ ID NO:9, and the C-terminal fragment of the intein is identified by SEQ ID NO:19 or SEQ ID NO:10.

23. A method comprising delivering to eukaryotic cells

[0075] (a) a first vector comprising (i) a N-terminal fragment of a bsr gene, which is upstream from a nucleotide sequence encoding an N-terminal fragment of an intein and (ii) a first molecule of interest; and

[0076] (b) a second vector comprising (ii) a nucleotide sequence encoding a C-terminal fragment of the intein, which is upstream from a C-terminal fragment of the bsr gene and (ii) a second molecule of interest,

[0077] wherein the N-terminal fragment and the C-terminal fragment of the intein catalyze joining of a protein fragment encoded by the N-terminal fragment of the bsr gene to a protein fragment encoded by the C-terminal fragment of the bsr gene to produce full-length blasticidin-S deaminase.

24. The method of paragraph 23, wherein the protein fragment encoded by the N-terminal fragment of the bsr gene comprises an amino acid sequence identified by amino acids 1-102 of SEQ ID NO: 4, and the protein fragment encoded by the C-terminal fragment of the bsr gene comprises an amino acid sequence identified by amino acids 103-140 of SEQ ID NO: 4.
25. The method of paragraph 22 or 23, wherein

[0078] the N-terminal fragment of the intein is identified by SEQ ID NO:16, and the C-terminal fragment of the intein is identified by SEQ ID NO:17;

[0079] the N-terminal fragment of the intein is identified by SEQ ID NO:7, and the C-terminal fragment of the intein is identified by SEQ ID NO:8; or

[0080] the N-terminal fragment of the intein is identified by SEQ ID NO:18 or SEQ ID NO:9, and the C-terminal fragment of the intein is identified by SEQ ID NO:19 or SEQ ID NO:10.

26. A method comprising delivering to eukaryotic cells

[0081] (a) a first vector comprising (i) a N-terminal fragment of a pac gene, which is upstream from a nucleotide sequence encoding an N-terminal fragment of an intein and (ii) a first molecule of interest; and

[0082] (b) a second vector comprising (ii) a nucleotide sequence encoding a C-terminal fragment of the intein, which is upstream from a C-terminal fragment of the pac gene and (ii) a second molecule of interest,

wherein the N-terminal fragment and the C-terminal fragment of the intein catalyze joining of a protein fragment encoded by the N-terminal fragment of the pac gene to a protein fragment encoded by the C-terminal fragment of the pac gene to produce full-length puromycin N-acetyl-transferase.
27. The method of paragraph 26, wherein

[0083] the protein fragment encoded by the N-terminal fragment of the pac gene comprises an amino acid sequence identified by amino acids 1-63 of SEQ ID NO: 2, and the protein fragment encoded by the C-terminal fragment of the pac gene comprises an amino acid sequence identified by amino acids 64-199 of SEQ ID NO: 2;

[0084] the protein fragment encoded by the N-terminal fragment of the pac gene comprises an amino acid sequence identified by amino acids 1-119 of SEQ ID NO: 2, and the protein fragment encoded by the C-terminal fragment of the pac gene comprises an amino acid sequence identified by amino acids 120-199 of SEQ ID NO: 2;

[0085] the protein fragment encoded by the N-terminal fragment of the pac gene comprises an amino acid sequence identified by amino acids 1-100 of SEQ ID NO: 2, and the protein fragment encoded by the C-terminal fragment of the pac gene comprises an amino acid sequence identified by amino acids 101-199 of SEQ ID NO: 2.

28. The method of paragraph 26 or 27, wherein

[0086] the N-terminal fragment of the intein is identified by SEQ ID NO:16, and the C-terminal fragment of the intein is identified by SEQ ID NO:17;

[0087] the N-terminal fragment of the intein is identified by SEQ ID NO:7, and the C-terminal fragment of the intein is identified by SEQ ID NO:8; or

[0088] the N-terminal fragment of the intein is identified by SEQ ID NO:18 or SEQ ID NO:9, and the C-terminal fragment of the intein is identified by SEQ ID NO:19 or SEQ ID NO:10.

29. A method comprising delivering to eukaryotic cells

[0089] (a) a first vector comprising (i) a N-terminal fragment of a neo gene, which is upstream from a nucleotide sequence encoding an N-terminal fragment of an intein and (ii) a first molecule of interest; and

[0090] (b) a second vector comprising (ii) a nucleotide sequence encoding a C-terminal fragment of the intein, which is upstream from a C-terminal fragment of the neo gene and (ii) a second molecule of interest,

[0091] wherein the N-terminal fragment and the C-terminal fragment of the intein catalyze joining of a protein fragment encoded by the N-terminal fragment of the neo gene to a protein fragment encoded by the C-terminal fragment of the neo gene to produce full-length aminoglycoside 3′-phosphotransferase.

30. The method of paragraph 29, wherein

[0092] the protein fragment encoded by the N-terminal fragment of the neo gene comprises an amino acid sequence identified by amino acids 1-133 of SEQ ID NO: 3 and the protein fragment encoded by the C-terminal fragment of the neo gene comprises an amino acid sequence identified by amino acids 134-267 of SEQ ID NO: 3; or

[0093] the protein fragment encoded by the N-terminal fragment of the neo gene comprises an amino acid sequence identified by amino acids 1-194 of SEQ ID NO: 3 and the protein fragment encoded by the C-terminal fragment of the neo gene comprises an amino acid sequence identified by amino acids 195-267 of SEQ ID NO: 3.

31. The method of paragraph 29 or 30, wherein

[0094] the N-terminal fragment of the intein is identified by SEQ ID NO:16, and the C-terminal fragment of the intein is identified by SEQ ID NO:17;

[0095] the N-terminal fragment of the intein is identified by SEQ ID NO:7, and the C-terminal fragment of the intein is identified by SEQ ID NO:8; or

[0096] the N-terminal fragment of the intein is identified by SEQ ID NO:18 or SEQ ID NO:9, and the C-terminal fragment of the intein is identified by SEQ ID NO:19 or SEQ ID NO:10.

32. A method comprising delivering to a composition comprising eukaryotic cells

[0097] (a) a first vector comprising (i) a nucleotide sequence encoding an N-terminal fragment of a fluorescent protein, which is upstream from a nucleotide sequence encoding an N-terminal fragment of an intein and (ii) a nucleotide sequence encoding a first molecule of interest; and

[0098] (b) a second vector comprising (ii) a nucleotide sequence encoding a C-terminal fragment of the intein, which is upstream from a C-terminal fragment of the fluorescent protein and (ii) a nucleotide sequence encoding a second molecule of interest,

[0099] wherein the N-terminal fragment and the C-terminal fragment of the intein catalyze joining of the N-terminal fragment of the fluorescent protein to the C-terminal fragment of the fluorescent protein to produce a full-length fluorescent protein.

33. The method of paragraph 51 further comprising maintaining the eukaryotic cells under conditions that permit introduction of the first and second vectors into the eukaryotic cells to produce transgenic eukaryotic cells.
34. The method of paragraph 33 further comprising selecting the transgenic eukaryotic cells that comprise the full-length fluorescent protein.
35. The method of any one of paragraphs 32-34, wherein the eukaryotic cells are mammalian cells.
36. The method of any one of paragraphs 32-35, wherein the fluorescent protein is selected from TagCFP, mTagCFP2, Czurite, ECFP2, mKalama1, Sirius, Sapphire, T-Sapphire, ECFP, Cerulean, SCFP3C, mTurquoise, mTurquoise2, monomeric Midoriishi-Cyan, TagCFP, mTFP1, EGFP, Emerald, Superfolder GFP, Monomeric Czami Green, TagGFP2, mUKG, mWasabi, Clover, mNeonGreen, EYFP, Citrine, Venus, SYFP2, TagYFP, Monomeric Kusabira-Orange, mKOK, mKO2, mOrange, mOrange2, mRaspberry, mCherry, mStrawberry, mTangerine, tdTomato, TagRFP, TagRFP-T, mCpple, mRuby, mRuby2, mPlum, HcRed-Tandem, mKate2, mNeptune, NirFP, TagRFP657, IFP1.4 and iRFP.
37. The method of any one of paragraphs 32-36, wherein the intein is a split intein.
38. The method of paragraph 37, wherein the split intein is a natural split intein.
39. The method of paragraph 38, wherein the natural split intein is selected from DnaE inteins.
40. The method of paragraph 39, wherein the DnaE inteins are selected from Synechocystis sp. DnaE (SspDnaE) inteins and Nostoc punctiforme (NpuDnaE) inteins.
41. The method of paragraph 40, wherein the split intein is an engineered split intein.
42. The method of paragraph 41, wherein the engineered split intein is engineered from DnaB inteins.
43. The method of paragraph 42, wherein the engineered split intein is a SspDnaB S1 intein.
44. The method of paragraph 42, wherein the engineered split intein is engineered from GyrB inteins.
45. The method of paragraph 44, wherein the engineered split intein is a SspGyrB S11 intein.
46. The method of any one of paragraphs 32-45, wherein the first and/or second molecule is a protein.
47. The method of any one of paragraphs 32-46, wherein the first and/or second molecule is a non-coding ribonucleic acid (RNA).
48. The method of paragraph 47, wherein the non-coding RNA is a microRNA (miRNA), antisense RNA, short-interfering RNA (siRNA) or short-hairpin RNA (shRNA).
49. The method of any one of paragraphs 32-48, wherein the first and/or second vector is a plasmid vector or a viral vector.
50. A method comprising delivering to eukaryotic cells

[0100] (a) a first vector comprising (i) an N-terminal fragment of an egfp gene, which is upstream from a nucleotide sequence encoding an N-terminal fragment of an intein and (ii) a first molecule of interest; and

[0101] (b) a second vector comprising (ii) a nucleotide sequence encoding a C-terminal fragment of an intein, which is upstream from a C-terminal fragment of an egfp gene and (ii) a second molecule of interest,

[0102] wherein the N-terminal fragment and the C-terminal fragment of the intein catalyze joining of a protein fragment encoded by the N-terminal fragment of the egfp gene to a protein fragment encoded by the C-terminal fragment of the egfp gene to produce full-length EGFP protein.

51. The method of paragraph 50, wherein the protein fragment encoded by the N-terminal fragment of the egfp gene comprises an amino acid sequence identified by amino acids 1-175 of SEQ ID NO: 5, and the protein fragment encoded by the C-terminal fragment of the egfp gene comprises an amino acid sequence identified by amino acids 175-239 of SEQ ID NO: 5.
52. The method of paragraph 50 or 51, wherein

[0103] the N-terminal fragment of the intein is identified by SEQ ID NO:16, and the C-terminal fragment of the intein is identified by SEQ ID NO:17;

[0104] the N-terminal fragment of the intein is identified by SEQ ID NO:7, and the C-terminal fragment of the intein is identified by SEQ ID NO:8; or

[0105] the N-terminal fragment of the intein is identified by SEQ ID NO:18 or SEQ ID NO:9, and the C-terminal fragment of the intein is identified by SEQ ID NO:19 or SEQ ID NO:10.

53. A method comprising delivering to eukaryotic cells

[0106] (a) a first vector comprising (i) an N-terminal fragment of an mScarlet gene, which is upstream from a nucleotide sequence encoding an N-terminal fragment of an intein and (ii) a first molecule of interest; and

[0107] (b) a second vector comprising (ii) a nucleotide sequence encoding a C-terminal fragment of an intein, which is upstream from a C-terminal fragment of an mScarlet gene and (ii) a second molecule of interest,

[0108] wherein the N-terminal fragment and the C-terminal fragment of the intein catalyze joining of a protein fragment encoded by the N-terminal fragment of the mScarlet gene to a protein fragment encoded by the C-terminal fragment of the mScarlet gene to produce full-length mScarlet protein.

54. The method of paragraph 53, wherein

[0109] the protein fragment encoded by the N-terminal fragment of the mScarlet gene comprises an amino acid sequence identified by amino acids 1-46 of SEQ ID NO: 6, and the protein fragment encoded by the C-terminal fragment of the mScarlet gene comprises an amino acid sequence identified by amino acids 47-232 of SEQ ID NO: 6;

[0110] the protein fragment encoded by the N-terminal fragment of the mScarlet gene comprises an amino acid sequence identified by amino acids 1-48 of SEQ ID NO: 6, and the protein fragment encoded by the C-terminal fragment of the mScarlet gene comprises an amino acid sequence identified by amino acids 49-232 of SEQ ID NO: 6;

[0111] the protein fragment encoded by the N-terminal fragment of the mScarlet gene comprises an amino acid sequence identified by amino acids 1-51 of SEQ ID NO: 6, and the protein fragment encoded by the C-terminal fragment of the mScarlet gene comprises an amino acid sequence identified by amino acids 52-232 of SEQ ID NO: 6;

[0112] the protein fragment encoded by the N-terminal fragment of the mScarlet gene comprises an amino acid sequence identified by amino acids 1-75 of SEQ ID NO: 6, and the protein fragment encoded by the C-terminal fragment of the mScarlet gene comprises an amino acid sequence identified by amino acids 76-232 of SEQ ID NO: 6;

[0113] the protein fragment encoded by the N-terminal fragment of the mScarlet gene comprises an amino acid sequence identified by amino acids 1-122 of SEQ ID NO: 6, and the protein fragment encoded by the C-terminal fragment of the mScarlet gene comprises an amino acid sequence identified by amino acids 123-232 of SEQ ID NO: 6;

[0114] the protein fragment encoded by the N-terminal fragment of the mScarlet gene comprises an amino acid sequence identified by amino acids 1-140 of SEQ ID NO: 6, and the protein fragment encoded by the C-terminal fragment of the mScarlet gene comprises an amino acid sequence identified by amino acids 141-232 of SEQ ID NO: 6;

[0115] the protein fragment encoded by the N-terminal fragment of the mScarlet gene comprises an amino acid sequence identified by amino acids 1-163 of SEQ ID NO: 6, and the protein fragment encoded by the C-terminal fragment of the mScarlet gene comprises an amino acid sequence identified by amino acids 164-232 of SEQ ID NO: 6.

55. The method of paragraph 53 or 54, wherein

[0116] the N-terminal fragment of the intein is identified by SEQ ID NO:16, and the C-terminal fragment of the intein is identified by SEQ ID NO:17;

[0117] the N-terminal fragment of the intein is identified by SEQ ID NO:7, and the C-terminal fragment of the intein is identified by SEQ ID NO:8; or

[0118] the N-terminal fragment of the intein is identified by SEQ ID NO:18 or SEQ ID NO:9, and the C-terminal fragment of the intein is identified by SEQ ID NO:19 or SEQ ID NO:10.

56. A eukaryotic cell, comprising

[0119] (a) a first vector comprising (i) a nucleotide sequence encoding an N-terminal fragment of an antibiotic resistance protein, which is upstream from a nucleotide sequence encoding an N-terminal fragment of an intein and (ii) a nucleotide sequence encoding a first molecule of interest; and

[0120] (b) a second vector comprising (i) a nucleotide sequence encoding a C-terminal fragment of the intein, which is upstream from a C-terminal fragment of the antibiotic resistance protein and (ii) a nucleotide sequence encoding a second molecule of interest,

[0121] wherein the N-terminal fragment and the C-terminal fragment of the intein catalyze joining of the N-terminal fragment and the C-terminal fragment of the antibiotic resistance protein to produce a full-length antibiotic resistance protein.

57. The cell of paragraph 56, wherein the eukaryotic cells are mammalian cells.
58. The cell of paragraph 56 or 57, wherein the antibiotic resistance protein confers resistance to hygromycin, G418, puromycin, phleomycin D1 or blasticidin.
59. The cell of any one of paragraphs 56-58, wherein the intein is a split intein.
60. The cell of paragraph 59, wherein the split intein is a natural split intein.
61. The cell of paragraph 60, wherein the natural split intein is selected from DnaE inteins.
62. The cell of paragraph 61, wherein the DnaE inteins are selected from Synechocystis sp. DnaE (SspDnaE) inteins and Nostoc punctiforme (NpuDnaE) inteins.
63. The cell of paragraph 59, wherein the split intein is an engineered split intein.
64. The cell of paragraph 63, wherein the engineered split intein is engineered from DnaB inteins.
65. The cell of paragraph 64, wherein the engineered split intein is a SspDnaB S1 intein.
66. The cell of paragraph 65, wherein the engineered split intein is engineered from GyrB inteins.
67. The cell of paragraph 66, wherein the engineered split intein is a SspGyrB S11 intein.
68. The cell of any one of paragraphs 56-67, wherein the first and/or second molecule is a protein.
69. The cell of any one of paragraphs 56-68, wherein the first and/or second molecule is a non-coding ribonucleic acid (RNA).
70. The cell of paragraph 69, wherein the non-coding RNA is a microRNA (miRNA), antisense RNA, short-interfering RNA (siRNA) or short-hairpin RNA (shRNA).
71. The cell of any one of paragraphs 56-70, wherein the first and/or second vector is a plasmid vector or a viral vector.
72. A cell comprising

[0122] (a) a first vector comprising (i) an N-terminal fragment of a hygB gene, which is upstream from a nucleotide sequence encoding an N-terminal fragment of an intein and (ii) a first molecule of interest; and

[0123] (b) a second vector comprising (ii) a nucleotide sequence encoding a C-terminal fragment of the intein, which is upstream from a C-terminal fragment of the hygB gene and (ii) a second molecule of interest,

[0124] wherein the N-terminal fragment and C-terminal fragment of the intein catalyze joining of a protein fragment encoded by the N-terminal fragment of the hygB gene to a protein fragment encoded by the C-terminal fragment of the hygB gene to produce full-length hygromycin B phosphotransferase.

73. The cell of paragraph 72, wherein the first amino acid of the protein fragment encoded by the second hygB gene fragment is cysteine.
74. The cell of paragraph 73, wherein

[0125] the protein fragment encoded by the N-terminal fragment of the hygB gene comprises an amino acid sequence identified by amino acids 1-89 of SEQ ID NO: 1, and the protein fragment encoded by the C-terminal fragment of the hygB gene comprises an amino acid sequence identified by amino acids 90-341 of SEQ ID NO: 1;

[0126] the protein fragment encoded by the N-terminal fragment of the hygB gene comprises an amino acid sequence identified by amino acids 1-200 of SEQ ID NO: 1, and the protein fragment encoded by the C-terminal fragment of the hygB gene comprises an amino acid sequence identified by amino acids 201-341 of SEQ ID NO: 1;

[0127] the protein fragment encoded by the N-terminal fragment of the hygB gene comprises an amino acid sequence identified by amino acids 1-53 of SEQ ID NO: 1, and the protein fragment encoded by the C-terminal fragment of the hygB gene comprises an amino acid sequence identified by amino acids 54-341 of SEQ ID NO: 1;

[0128] the protein fragment encoded by the N-terminal fragment of the hygB gene comprises an amino acid sequence identified by amino acids 1-240 of SEQ ID NO: 1, and the protein fragment encoded by the C-terminal fragment of the hygB gene comprises an amino acid sequence identified by amino acids 241-341 of SEQ ID NO: 1;

[0129] the protein fragment encoded by the N-terminal fragment of the hygB gene comprises an amino acid sequence identified by amino acids 1-292 of SEQ ID NO: 1, and the protein fragment encoded by the C-terminal fragment of the hygB gene comprises an amino acid sequence identified by amino acids 293-341 of SEQ ID NO: 1.

75. The cell of any one of paragraphs 72-74, wherein

[0130] the N-terminal fragment of the intein is identified by SEQ ID NO:16, and the C-terminal fragment of the intein is identified by SEQ ID NO:17;

[0131] the N-terminal fragment of the intein is identified by SEQ ID NO:7, and the C-terminal fragment of the intein is identified by SEQ ID NO:8; or

[0132] the N-terminal fragment of the intein is identified by SEQ ID NO:18 or SEQ ID NO:9, and the C-terminal fragment of the intein is identified by SEQ ID NO:19 or SEQ ID NO:10.

76. A eukaryotic cell, comprising

[0133] (a) a first vector comprising (i) a N-terminal fragment of a bsr gene, which is upstream from a nucleotide sequence encoding an N-terminal fragment of an intein and (ii) a first molecule of interest; and

[0134] (b) a second vector comprising (ii) a nucleotide sequence encoding a C-terminal fragment of the intein, which is upstream from a C-terminal fragment of the bsr gene and (ii) a second molecule of interest,

[0135] wherein the N-terminal fragment and the C-terminal fragment of the intein catalyze joining of a protein fragment encoded by the N-terminal fragment of the bsr gene to a protein fragment encoded by the C-terminal fragment of the bsr gene to produce full-length blasticidin-S deaminase.

77. The cell of paragraph 76, wherein the protein fragment encoded by the N-terminal fragment of the bsr gene comprises an amino acid sequence identified by amino acids 1-102 of SEQ ID NO: 4, and the protein fragment encoded by the C-terminal fragment of the bsr gene comprises an amino acid sequence identified by amino acids 103-140 of SEQ ID NO: 4.
78. The cell of paragraph 76 or 77, wherein

[0136] the N-terminal fragment of the intein is identified by SEQ ID NO:16, and the C-terminal fragment of the intein is identified by SEQ ID NO:17;

[0137] the N-terminal fragment of the intein is identified by SEQ ID NO:7, and the C-terminal fragment of the intein is identified by SEQ ID NO:8; or

[0138] the N-terminal fragment of the intein is identified by SEQ ID NO:18 or SEQ ID NO:9, and the C-terminal fragment of the intein is identified by SEQ ID NO:19 or SEQ ID NO:10.

79. A eukaryotic cell, comprising

[0139] (a) a first vector comprising (i) a N-terminal fragment of a pac gene, which is upstream from a nucleotide sequence encoding an N-terminal fragment of an intein and (ii) a first molecule of interest; and

[0140] (b) a second vector comprising (ii) a nucleotide sequence encoding a C-terminal fragment of the intein, which is upstream from a C-terminal fragment of the pac gene and (ii) a second molecule of interest,

[0141] wherein the N-terminal fragment and the C-terminal fragment of the intein catalyze joining of a protein fragment encoded by the N-terminal fragment of the pac gene to a protein fragment encoded by the C-terminal fragment of the pac gene to produce full-length puromycin N-acetyl-transferase.

80. The cell of paragraph 79, wherein

[0142] the protein fragment encoded by the N-terminal fragment of the pac gene comprises an amino acid sequence identified by amino acids 1-63 of SEQ ID NO: 2, and the protein fragment encoded by the C-terminal fragment of the pac gene comprises an amino acid sequence identified by amino acids 64-199 of SEQ ID NO: 2;

[0143] the protein fragment encoded by the N-terminal fragment of the pac gene comprises an amino acid sequence identified by amino acids 1-119 of SEQ ID NO: 2, and the protein fragment encoded by the C-terminal fragment of the pac gene comprises an amino acid sequence identified by amino acids 120-199 of SEQ ID NO: 2;

[0144] the protein fragment encoded by the N-terminal fragment of the pac gene comprises an amino acid sequence identified by amino acids 1-100 of SEQ ID NO: 2, and the protein fragment encoded by the C-terminal fragment of the pac gene comprises an amino acid sequence identified by amino acids 101-199 of SEQ ID NO: 2.

81. The cell of paragraph 79 or 80, wherein

[0145] the N-terminal fragment of the intein is identified by SEQ ID NO:16, and the C-terminal fragment of the intein is identified by SEQ ID NO:17;

[0146] the N-terminal fragment of the intein is identified by SEQ ID NO:7, and the C-terminal fragment of the intein is identified by SEQ ID NO:8; or

[0147] the N-terminal fragment of the intein is identified by SEQ ID NO:18 or SEQ ID NO:9, and the C-terminal fragment of the intein is identified by SEQ ID NO:19 or SEQ ID NO:10.

82. A eukaryotic cell, comprising

[0148] (a) a first vector comprising (i) a N-terminal fragment of a neo gene, which is upstream from a nucleotide sequence encoding an N-terminal fragment of an intein and (ii) a first molecule of interest; and

[0149] (b) a second vector comprising (ii) a nucleotide sequence encoding a C-terminal fragment of the intein, which is upstream from a C-terminal fragment of the neo gene and (ii) a second molecule of interest,

[0150] wherein the N-terminal fragment and the C-terminal fragment of the intein catalyze joining of a protein fragment encoded by the N-terminal fragment of the neo gene to a protein fragment encoded by the C-terminal fragment of the neo gene to produce full-length aminoglycoside 3′-phosphotransferase.

83. The cell of paragraph 82, wherein

[0151] the protein fragment encoded by the N-terminal fragment of the neo gene comprises an amino acid sequence identified by amino acids 1-133 of SEQ ID NO: 3 and the protein fragment encoded by the C-terminal fragment of the neo gene comprises an amino acid sequence identified by amino acids 134-267 of SEQ ID NO: 3; or

[0152] the protein fragment encoded by the N-terminal fragment of the neo gene comprises an amino acid sequence identified by amino acids 1-194 of SEQ ID NO: 3 and the protein fragment encoded by the C-terminal fragment of the neo gene comprises an amino acid sequence identified by amino acids 195-267 of SEQ ID NO: 3.

84. The cell of paragraph 82 or 83, wherein

[0153] the N-terminal fragment of the intein is identified by SEQ ID NO:16, and the C-terminal fragment of the intein is identified by SEQ ID NO:17;

[0154] the N-terminal fragment of the intein is identified by SEQ ID NO:7, and the C-terminal fragment of the intein is identified by SEQ ID NO:8; or

[0155] the N-terminal fragment of the intein is identified by SEQ ID NO:18 or SEQ ID NO:9, and the C-terminal fragment of the intein is identified by SEQ ID NO:19 or SEQ ID NO:10.

85. A eukaryotic cell, comprising

[0156] (a) a first vector comprising (i) a nucleotide sequence encoding an N-terminal fragment of a fluorescent protein, which is upstream from a nucleotide sequence encoding an N-terminal fragment of an intein and (ii) a nucleotide sequence encoding a first molecule of interest; and

[0157] (b) a second vector comprising (ii) a nucleotide sequence encoding a C-terminal fragment of the intein, which is upstream from a C-terminal fragment of the fluorescent protein and (ii) a nucleotide sequence encoding a second molecule of interest,

[0158] wherein the N-terminal fragment and the C-terminal fragment of the intein catalyze joining of the N-terminal fragment of the fluorescent protein to the C-terminal fragment of the fluorescent protein to produce a full-length fluorescent protein.

86. The cell of paragraph 85 further comprising maintaining the eukaryotic cells under conditions that permit introduction of the first and second vectors into the eukaryotic cells to produce transgenic eukaryotic cells.
87. The cell of paragraph 86 further comprising selecting the transgenic eukaryotic cells that comprise the full-length fluorescent protein.
88. The cell of any one of paragraphs 85-87, wherein the eukaryotic cells are mammalian cells.
89. The cell of any one of paragraphs 85-88, wherein the fluorescent protein is selected from TagCFP, mTagCFP2, Czurite, ECFP2, mKalama1, Sirius, Sapphire, T-Sapphire, ECFP, Cerulean, SCFP3C, mTurquoise, mTurquoise2, monomeric Midoriishi-Cyan, TagCFP, mTFP1, EGFP, Emerald, Superfolder GFP, Monomeric Czami Green, TagGFP2, mUKG, mWasabi, Clover, mNeonGreen, EYFP, Citrine, Venus, SYFP2, TagYFP, Monomeric Kusabira-Orange, mKOK, mKO2, mOrange, mOrange2, mRaspberry, mCherry, mStrawberry, mTangerine, tdTomato, TagRFP, TagRFP-T, mCpple, mRuby, mRuby2, mPlum, HcRed-Tandem, mKate2, mNeptune, NirFP, TagRFP657, IFP1.4 and iRFP.
90. The cell of any one of paragraphs 85-89, wherein the intein is a split intein.
91. The cell of paragraph 90, wherein the split intein is a natural split intein.
92. The cell of paragraph 91, wherein the natural split intein is selected from DnaE inteins.
93. The cell of paragraph 92, wherein the DnaE inteins are selected from Synechocystis sp. DnaE (SspDnaE) inteins and Nostoc punctiforme (NpuDnaE) inteins.
94. The cell of paragraph 93, wherein the split intein is an engineered split intein.
95. The cell of paragraph 94, wherein the engineered split intein is engineered from DnaB inteins.
96. The cell of paragraph 95, wherein the engineered split intein is a SspDnaB S1 intein.
97. The cell of paragraph 95, wherein the engineered split intein is engineered from GyrB inteins.
98. The cell of paragraph 97, wherein the engineered split intein is a SspGyrB S11 intein.
99. The cell of any one of paragraphs 85-98, wherein the first and/or second molecule is a protein.
100. The cell of any one of paragraphs 85-99, wherein the first and/or second molecule is a non-coding ribonucleic acid (RNA).
101. The cell of paragraph 100, wherein the non-coding RNA is a microRNA (miRNA), antisense RNA, short-interfering RNA (siRNA) or short-hairpin RNA (shRNA).
102. The cell of any one of paragraphs 85-101, wherein the first and/or second vector is a plasmid vector or a viral vector.
103. A eukaryotic cell, comprising

[0159] (a) a first vector comprising (i) an N-terminal fragment of an egfp gene, which is upstream from a nucleotide sequence encoding an N-terminal fragment of an intein and (ii) a first molecule of interest; and

[0160] (b) a second vector comprising (ii) a nucleotide sequence encoding a C-terminal fragment of an intein, which is upstream from a C-terminal fragment of an egfp gene and (ii) a second molecule of interest,

[0161] wherein the N-terminal fragment and the C-terminal fragment of the intein catalyze joining of a protein fragment encoded by the N-terminal fragment of the egfp gene to a protein fragment encoded by the C-terminal fragment of the egfp gene to produce full-length EGFP protein.

104. The cell of paragraph 103, wherein the protein fragment encoded by the N-terminal fragment of the egfp gene comprises an amino acid sequence identified by amino acids 1-175 of SEQ ID NO: 5, and the protein fragment encoded by the C-terminal fragment of the egfp gene comprises an amino acid sequence identified by amino acids 175-239 of SEQ ID NO: 5.
105. The cell of paragraph 103 or 104, wherein

[0162] the N-terminal fragment of the intein is identified by SEQ ID NO:16, and the C-terminal fragment of the intein is identified by SEQ ID NO:17;

[0163] the N-terminal fragment of the intein is identified by SEQ ID NO:7, and the C-terminal fragment of the intein is identified by SEQ ID NO:8; or

[0164] the N-terminal fragment of the intein is identified by SEQ ID NO:18 or SEQ ID NO:9, and the C-terminal fragment of the intein is identified by SEQ ID NO:19 or SEQ ID NO:10.

106. A eukaryotic cell, comprising

[0165] (a) a first vector comprising (i) an N-terminal fragment of an mScarlet gene, which is upstream from a nucleotide sequence encoding an N-terminal fragment of an intein and (ii) a first molecule of interest; and

[0166] (b) a second vector comprising (ii) a nucleotide sequence encoding a C-terminal fragment of an intein, which is upstream from a C-terminal fragment of an mScarlet gene and (ii) a second molecule of interest,

[0167] wherein the N-terminal fragment and the C-terminal fragment of the intein catalyze joining of a protein fragment encoded by the N-terminal fragment of the mScarlet gene to a protein fragment encoded by the C-terminal fragment of the mScarlet gene to produce full-length mScarlet protein.

107. The cell of paragraph 106, wherein

[0168] the protein fragment encoded by the N-terminal fragment of the mScarlet gene comprises an amino acid sequence identified by amino acids 1-46 of SEQ ID NO: 6, and the protein fragment encoded by the C-terminal fragment of the mScarlet gene comprises an amino acid sequence identified by amino acids 47-232 of SEQ ID NO: 6;

[0169] the protein fragment encoded by the N-terminal fragment of the mScarlet gene comprises an amino acid sequence identified by amino acids 1-48 of SEQ ID NO: 6, and the protein fragment encoded by the C-terminal fragment of the mScarlet gene comprises an amino acid sequence identified by amino acids 49-232 of SEQ ID NO: 6;

[0170] the protein fragment encoded by the N-terminal fragment of the mScarlet gene comprises an amino acid sequence identified by amino acids 1-51 of SEQ ID NO: 6, and the protein fragment encoded by the C-terminal fragment of the mScarlet gene comprises an amino acid sequence identified by amino acids 52-232 of SEQ ID NO: 6;

[0171] the protein fragment encoded by the N-terminal fragment of the mScarlet gene comprises an amino acid sequence identified by amino acids 1-75 of SEQ ID NO: 6, and the protein fragment encoded by the C-terminal fragment of the mScarlet gene comprises an amino acid sequence identified by amino acids 76-232 of SEQ ID NO: 6;
[0172] the protein fragment encoded by the N-terminal fragment of the mScarlet gene comprises an amino acid sequence identified by amino acids 1-122 of SEQ ID NO: 6, and the protein fragment encoded by the C-terminal fragment of the mScarlet gene comprises an amino acid sequence identified by amino acids 123-232 of SEQ ID NO: 6;

[0173] the protein fragment encoded by the N-terminal fragment of the mScarlet gene comprises an amino acid sequence identified by amino acids 1-140 of SEQ ID NO: 6, and the protein fragment encoded by the C-terminal fragment of the mScarlet gene comprises an amino acid sequence identified by amino acids 141-232 of SEQ ID NO: 6;

[0174] the protein fragment encoded by the N-terminal fragment of the mScarlet gene comprises an amino acid sequence identified by amino acids 1-163 of SEQ ID NO: 6, and the protein fragment encoded by the C-terminal fragment of the mScarlet gene comprises an amino acid sequence identified by amino acids 164-232 of SEQ ID NO: 6.

108. The cell of paragraph 106 or 107, wherein

[0175] the N-terminal fragment of the intein is identified by SEQ ID NO:16, and the C-terminal fragment of the intein is identified by SEQ ID NO:17;

[0176] the N-terminal fragment of the intein is identified by SEQ ID NO:7, and the C-terminal fragment of the intein is identified by SEQ ID NO:8; or

[0177] the N-terminal fragment of the intein is identified by SEQ ID NO:18 or SEQ ID NO:9, and the C-terminal fragment of the intein is identified by SEQ ID NO:19 or SEQ ID NO:10.

109. A composition comprising the cell of any one of paragraph 85-108.
110. A kit, comprising

[0178] (a) a first vector comprising a nucleotide sequence encoding an N-terminal fragment of an antibiotic resistance protein, which is upstream from a nucleotide sequence encoding an N-terminal fragment of an intein; and

[0179] (b) a second vector comprising a nucleotide sequence encoding a C-terminal fragment of the intein, which is upstream from a C-terminal fragment of the antibiotic resistance protein,

[0180] wherein the N-terminal fragment and the C-terminal fragment of the intein catalyze joining of the N-terminal fragment and the C-terminal fragment of the antibiotic resistance protein to produce a full-length antibiotic resistance protein.

111. The kit of paragraph 110, wherein the antibiotic resistance protein confers resistance to hygromycin, G418, puromycin, phleomycin D1 or blasticidin.
112. A kit, comprising

[0181] (a) a first vector comprising a nucleotide sequence encoding an N-terminal fragment of a fluorescent protein, which is upstream from a nucleotide sequence encoding an N-terminal fragment of an intein; and

[0182] (b) a second vector comprising a nucleotide sequence encoding a C-terminal fragment of the intein, which is upstream from a C-terminal fragment of the fluorescent protein,

[0183] wherein the N-terminal fragment and the C-terminal fragment of the intein catalyze joining of the N-terminal fragment of the fluorescent protein to the C-terminal fragment of the fluorescent protein to produce a full-length fluorescent protein.

113. The kit of paragraph 112, wherein the fluorescent protein is selected from TagCFP, mTagCFP2, Czurite, ECFP2, mKalama1, Sirius, Sapphire, T-Sapphire, ECFP, Cerulean, SCFP3C, mTurquoise, mTurquoise2, monomeric Midoriishi-Cyan, TagCFP, mTFP1, EGFP, Emerald, Superfolder GFP, Monomeric Czami Green, TagGFP2, mUKG, mWasabi, Clover, mNeonGreen, EYFP, Citrine, Venus, SYFP2, TagYFP, Monomeric Kusabira-Orange, mKOK, mKO2, mOrange, mOrange2, mRaspberry, mCherry, mStrawberry, mTangerine, tdTomato, TagRFP, TagRFP-T, mCpple, mRuby, mRuby2, mPlum, HcRed-Tandem, mKate2, mNeptune, NirFP, TagRFP657, IFP1.4 and iRFP.
114. The kit of any one of paragraphs 110-113, wherein the intein is a split intein.
115. The kit of paragraph 114, wherein the split intein is a natural split intein or an engineered split intein.
116. The kit of paragraph 115, wherein the natural split intein is selected from DnaE inteins.
117. The kit of paragraph 116, wherein the DnaE inteins are selected from Synechocystis sp. DnaE (SspDnaE) inteins and Nostoc punctiforme (NpuDnaE) inteins.
118. The kit of paragraph 115, wherein the engineered split intein is engineered from DnaB inteins or GyrB inteins.
119. The kit of paragraph 118, wherein the engineered split intein is a SspDnaB S1 intein.
120. The kit of paragraph 118, wherein the engineered split intein is a SspGyrB S11 intein.
121. The kit of any one of paragraphs 112-120, further comprising any one or more of the following components: buffers, salts, cloning enzymes, competent cells, transfection reagents, antibiotics, and/or instructions for performing the methods described herein.
122. A method comprising delivering to eukaryotic cells

[0184] (a) a first vector comprising (i) a nucleotide sequence encoding an N-terminal fragment of an antibiotic resistance protein, which is upstream from a nucleotide sequence encoding an N-terminal fragment of a first intein and (ii) a nucleotide sequence encoding a first molecule of interest,

[0185] (b) a second vector comprising (i) a nucleotide sequence encoding a C-terminal fragment of the first intein, which is upstream from a nucleotide sequence encoding a central fragment of the antibiotic resistance protein, which is upstream from a nucleotide sequence encoding an N-terminal fragment of a second intein and (ii) a nucleotide sequence encoding a second molecule of interest, and

[0186] (c) a third vector comprising (i) a nucleotide sequence encoding a C-terminal fragment of the second intein, which is upstream from a nucleotide sequence encoding a C-terminal fragment of the antibiotic resistance protein and (ii) a nucleotide sequence encoding a third molecule of interest,

[0187] wherein the N-terminal fragment and the C-terminal fragment of the first intein catalyze joining of N-terminal fragment of the antibiotic resistance protein to the central fragment of the antibiotic resistance protein, and the N-terminal fragment and the C-terminal fragment of the second intein catalyze joining of central fragment of the antibiotic resistance protein to the C-terminal fragment of the antibiotic resistance protein, to produce a full-length antibiotic resistance protein.

123. The method of paragraph 112 further comprising maintaining the eukaryotic cells under conditions that permit introduction of the first, second, and third vectors into the eukaryotic cells to produce transgenic eukaryotic cells.
124. The method of paragraph 123 further comprising selecting the transgenic eukaryotic cells that comprise the full-length antibiotic resistance protein.
125. The method of any one of paragraphs 112-124, wherein the eukaryotic cells are mammalian cells.
126. The method of any one of paragraphs 112-125, wherein the antibiotic resistance protein confers resistance to hygromycin, G418, puromycin, phleomycin D1 or blasticidin.
127. The method of paragraph 126, wherein the antibiotic resistance protein confers resistance to hygromycin.
128. The method of any one of paragraphs 112-127, wherein the first intein is a split intein.
129. The method of any one of paragraphs 112-128, wherein the second intein is a split intein.
130. The method of paragraph 128 or 129, wherein the split intein is a natural split intein.
131. The method of paragraph 130, wherein the natural split intein is selected from DnaE inteins.
132. The method of paragraph 131, wherein the DnaE inteins are selected from Synechocystis sp. DnaE (SspDnaE) inteins and Nostoc punctiforme (NpuDnaE) inteins.
133. The method of paragraph 132, wherein the first intein is an NpuDnaE intein and the second intein is an NpuDnaE intein.
134. The method of any one of paragraphs 112-133, wherein the first molecule of interest, second molecule of interest, third molecule of interest, or any combination thereof is a protein.
135. The method of any one of paragraphs 112-133, wherein the first molecule of interest, second molecule of interest, third molecule of interest, or any combination thereof is a non-coding ribonucleic acid (RNA).
136. The method of paragraph 135, wherein the non-coding RNA is a microRNA (miRNA), antisense RNA, short-interfering RNA (siRNA) or short-hairpin RNA (shRNA).
137. The method of any one of paragraphs 112-136, wherein the first vector, second vector, third vector, or any combination thereof, is a plasmid vector or a viral vector.
138. A method comprising delivering to eukaryotic cells

[0188] (a) a first vector comprising (i) an N-terminal fragment of a hygB gene, which is upstream from a nucleotide sequence encoding an N-terminal fragment of a first intein and (ii) a nucleotide sequence encoding a first molecule of interest,

[0189] (b) a second vector comprising (i) a nucleotide sequence encoding a C-terminal fragment of the first intein, which is upstream from a central fragment of the hygB gene, which is upstream from a nucleotide sequence encoding an N-terminal fragment of a second intein and (ii) a nucleotide sequence encoding a second molecule of interest, and

[0190] (c) a third vector comprising (i) a nucleotide sequence encoding a C-terminal fragment of the second intein, which is upstream from a C-terminal fragment of the hygB gene and (ii) a nucleotide sequence encoding a third molecule of interest,

[0191] wherein the N-terminal fragment and the C-terminal fragment of the first intein catalyze joining of the protein fragment encoded by N-terminal fragment of the hygB gene to a protein fragment encoded by the central fragment of the hygB gene, and the N-terminal fragment and the C-terminal fragment of the second intein catalyze joining of the protein fragment encoded by the central fragment of the hygB gene to the protein fragment encoded by the C-terminal fragment of the hygB gene, to produce a full-length hygromycin B phosphotransferase.

139. The method of paragraph 138, wherein the first vector encodes the sequence identified by SEQ ID NO: 29, the second vector encodes the sequence identified by SEQ ID NO: 61, and the third vector encodes the sequence identified by SEQ ID NO: 23.
140. The method of paragraph 138, wherein the first vector encodes the sequence identified by SEQ ID NO: 21, the second vector encodes the sequence identified by SEQ ID NO: 61, and the third vector encodes the sequence identified by SEQ ID NO: 35.
141. A eukaryotic cell comprising:

[0192] (a) a first vector comprising (i) a nucleotide sequence encoding an N-terminal fragment of an antibiotic resistance protein, which is upstream from a nucleotide sequence encoding an N-terminal fragment of a first intein and (ii) a nucleotide sequence encoding a first molecule of interest,

[0193] (b) a second vector comprising (i) a nucleotide sequence encoding a C-terminal fragment of the first intein, which is upstream from a nucleotide sequence encoding a central fragment of the antibiotic resistance protein, which is upstream from a nucleotide sequence encoding an N-terminal fragment of a second intein and (ii) a nucleotide sequence encoding a second molecule of interest, and

[0194] (c) a third vector comprising (i) a nucleotide sequence encoding a C-terminal fragment of the second intein, which is upstream from a nucleotide sequence encoding a C-terminal fragment of the antibiotic resistance protein and (ii) a nucleotide sequence encoding a third molecule of interest,

[0195] wherein the N-terminal fragment and the C-terminal fragment of the first intein catalyze joining of N-terminal fragment of the antibiotic resistance protein to the central fragment of the antibiotic resistance protein, and the N-terminal fragment and the C-terminal fragment of the second intein catalyze joining of central fragment of the antibiotic resistance protein to the C-terminal fragment of the antibiotic resistance protein, to produce a full-length antibiotic resistance protein.

142. The eukaryotic cell of paragraph 112, wherein the eukaryotic cells are mammalian cells.
143. The eukaryotic cell of paragraph 141 or 142, wherein the antibiotic resistance protein confers resistance to hygromycin, G418, puromycin, phleomycin D1 or blasticidin.
144. The eukaryotic cell of paragraph 143, wherein the antibiotic resistance protein confers resistance to hygromycin.
145. The eukaryotic cell of any one of paragraphs 141-144, wherein the first intein is a split intein.
146. The eukaryotic cell of any one of paragraphs 142-145, wherein the second intein is a split intein.
147. The eukaryotic cell of paragraph 145 or 146, wherein the split intein is a natural split intein.
148. The eukaryotic cell of paragraph 147, wherein the natural split intein is selected from DnaE inteins.
149. The eukaryotic cell of paragraph 148, wherein the DnaE inteins are selected from Synechocystis sp. DnaE (SspDnaE) inteins and Nostoc punctiforme (NpuDnaE) inteins.
150. The eukaryotic cell of paragraph 149, wherein the first intein is an NpuDnaE intein and the second intein is an NpuDnaE intein.
151. The eukaryotic cell of any one of paragraphs 142-150, wherein the first molecule of interest, second molecule of interest, third molecule of interest, or any combination thereof is a protein.
152. The eukaryotic cell of any one of paragraphs 142-150, wherein the first molecule of interest, second molecule of interest, third molecule of interest, or any combination thereof is a non-coding ribonucleic acid (RNA).
153. The eukaryotic cell of paragraph 152, wherein the non-coding RNA is a microRNA (miRNA), antisense RNA, short-interfering RNA (siRNA) or short-hairpin RNA (shRNA).
154. The eukaryotic cell of any one of paragraphs 142-153, wherein the first vector, second vector, third vector, or any combination thereof, is a plasmid vector or a viral vector.
155. A composition comprising the eukaryotic cell of any one of paragraph 142-154.
156. A kit comprising:

[0196] (a) a first vector comprising a nucleotide sequence encoding an N-terminal fragment of an antibiotic resistance protein, which is upstream from a nucleotide sequence encoding an N-terminal fragment of a first intein,

[0197] (b) a second vector comprising a nucleotide sequence encoding a C-terminal fragment of the first intein, which is upstream from a nucleotide sequence encoding a central fragment of the antibiotic resistance protein, which is upstream from a nucleotide sequence encoding an N-terminal fragment of a second intein, and

[0198] (c) a third vector comprising a nucleotide sequence encoding a C-terminal fragment of the second intein, which is upstream from a nucleotide sequence encoding a C-terminal fragment of the antibiotic resistance protein,

[0199] wherein the N-terminal fragment and the C-terminal fragment of the first intein catalyze joining of N-terminal fragment of the antibiotic resistance protein to the central fragment of the antibiotic resistance protein, and the N-terminal fragment and the C-terminal fragment of the second intein catalyze joining of central fragment of the antibiotic resistance protein to the C-terminal fragment of the antibiotic resistance protein, to produce a full-length antibiotic resistance protein.

157. The kit of paragraph 156, wherein the antibiotic resistance protein confers resistance to hygromycin, G418, puromycin, phleomycin D1 or blasticidin.
158. The kit of paragraph 157, wherein the antibiotic resistance protein confers resistance to hygromycin.
159. The kit of any one of paragraphs 156-158, wherein the first intein is a split intein.
160. The kit of any one of paragraphs 156-159, wherein the second intein is a split intein.
161. The kit of paragraph 159 or 160, wherein the split intein is a natural split intein.
162. The kit of paragraph 161, wherein the natural split intein is selected from DnaE inteins.
163. The kit of paragraph 162, wherein the DnaE inteins are selected from Synechocystis sp. DnaE (SspDnaE) inteins and Nostoc punctiforme (NpuDnaE) inteins.
164. The kit of paragraph 163, wherein the first intein is an NpuDnaE intein and the second intein is an NpuDnaE intein.
165. The kit of any one of paragraphs 156-164, wherein the first molecule of interest, second molecule of interest, third molecule of interest, or any combination thereof is a protein.
166. The kit of any one of paragraphs 156-164, wherein the first molecule of interest, second molecule of interest, third molecule of interest, or any combination thereof is a non-coding ribonucleic acid (RNA).
167. The kit of paragraph 166, wherein the non-coding RNA is a microRNA (miRNA), antisense RNA, short-interfering RNA (siRNA) or short-hairpin RNA (shRNA).
168. The kit of any one of paragraphs 156-167, wherein the first vector, second vector, third vector, or any combination thereof, is a plasmid vector or a viral vector.
169. A method comprising delivering to eukaryotic cells

[0200] (a) a first vector comprising (i) a nucleotide sequence encoding an N-terminal fragment of a fluorescent protein, which is upstream from a nucleotide sequence encoding an N-terminal fragment of a first intein and (ii) a nucleotide sequence encoding a first molecule of interest,

[0201] (b) a second vector comprising (i) a nucleotide sequence encoding a C-terminal fragment of the first intein, which is upstream from a nucleotide sequence encoding a central fragment of the fluorescent protein, which is upstream from a nucleotide sequence encoding an N-terminal fragment of a second intein and (ii) a nucleotide sequence encoding a second molecule of interest, and

[0202] (c) a third vector comprising (i) a nucleotide sequence encoding a C-terminal fragment of the second intein, which is upstream from a nucleotide sequence encoding a C-terminal fragment of the fluorescent protein and (ii) a nucleotide sequence encoding a third molecule of interest,

[0203] wherein the N-terminal fragment and the C-terminal fragment of the first intein catalyze joining of N-terminal fragment of the fluorescent protein to the central fragment of the fluorescent protein, and the N-terminal fragment and the C-terminal fragment of the second intein catalyze joining of central fragment of the fluorescent protein to the C-terminal fragment of the fluorescent protein, to produce a full-length fluorescent protein.

170. The method of paragraph 169 further comprising maintaining the eukaryotic cells under conditions that permit introduction of the first, second, and third vectors into the eukaryotic cells to produce transgenic eukaryotic cells.
171. The method of paragraph 170 further comprising selecting the transgenic eukaryotic cells that comprise the full-length fluorescent protein.
172. The method of any one of paragraphs 169-171, wherein the eukaryotic cells are mammalian cells.
173. The method of any one of paragraphs 169-172, wherein the fluorescent protein is selected from TagCFP, mTagCFP2, Czurite, ECFP2, mKalama1, Sirius, Sapphire, T-Sapphire, ECFP, Cerulean, SCFP3C, mTurquoise, mTurquoise2, monomeric Midoriishi-Cyan, TagCFP, mTFP1, EGFP, Emerald, Superfolder GFP, Monomeric Czami Green, TagGFP2, mUKG, mWasabi, Clover, mNeonGreen, EYFP, Citrine, Venus, SYFP2, TagYFP, Monomeric Kusabira-Orange, mKOK, mScarlet, mKO2, mOrange, mOrange2, mRaspberry, mCherry, mStrawberry, mTangerine, tdTomato, TagRFP, TagRFP-T, mCpple, mRuby, mRuby2, mPlum, HcRed-Tandem, mKate2, mNeptune, NirFP, TagRFP657, IFP1.4 and iRFP.
174. The method of paragraph 173, wherein the fluorescent protein is mScarlet.
175. The method of any one of paragraphs 169-174, wherein the first intein is a split intein.
176. The method of any one of paragraphs 169-175, wherein the second intein is a split intein.
177. The method of paragraph 175 or 176, wherein the split intein is a natural split intein.
178. The method of paragraph 177, wherein the natural split intein is selected from DnaE inteins.
179. The method of paragraph 178, wherein the DnaE inteins are selected from Synechocystis sp. DnaE (SspDnaE) inteins and Nostoc punctiforme (NpuDnaE) inteins.
180. The method of paragraph 179, wherein the first intein is an NpuDnaE intein and the second intein is an NpuDnaE intein.
181. The method of any one of paragraphs 169-170, wherein the first molecule of interest, second molecule of interest, third molecule of interest, or any combination thereof is a protein.
182. The method of any one of paragraphs 169-180, wherein the first molecule of interest, second molecule of interest, third molecule of interest, or any combination thereof is a non-coding ribonucleic acid (RNA).
183. The method of paragraph 182, wherein the non-coding RNA is a microRNA (miRNA), antisense RNA, short-interfering RNA (siRNA) or short-hairpin RNA (shRNA).
184. The method of any one of paragraphs 169-183, wherein the first vector, second vector, third vector, or any combination thereof, is a plasmid vector or a viral vector.
185. A method comprising delivering to eukaryotic cells

[0204] (a) a first vector comprising (i) an N-terminal fragment of a mScarlet gene, which is upstream from a nucleotide sequence encoding an N-terminal fragment of a first intein and (ii) a nucleotide sequence encoding a first molecule of interest,

[0205] (b) a second vector comprising (i) a nucleotide sequence encoding a C-terminal fragment of the first intein, which is upstream from a central fragment of the mScarlet gene, which is upstream from a nucleotide sequence encoding an N-terminal fragment of a second intein and (ii) a nucleotide sequence encoding a second molecule of interest, and

[0206] (c) a third vector comprising (i) a nucleotide sequence encoding a C-terminal fragment of the second intein, which is upstream from a C-terminal fragment of the mScarlet gene and (ii) a nucleotide sequence encoding a third molecule of interest,

[0207] wherein the N-terminal fragment and the C-terminal fragment of the first intein catalyze joining of the protein fragment encoded by N-terminal fragment of the mScarlet gene to a protein fragment encoded by the central fragment of the mScarlet gene, and the N-terminal fragment and the C-terminal fragment of the second intein catalyze joining of the protein fragment encoded by the central fragment of the mScarlet gene to the protein fragment encoded by the C-terminal fragment of the mScarlet gene, to produce a full-length mScarlet protein.

186. The method of paragraph 185, wherein the first vector encodes the sequence identified by SEQ ID NO: 121, the second vector encodes the sequence identified by SEQ ID NO: 123, and the third vector encodes the sequence identified by SEQ ID NO: 125.
187. A eukaryotic cell comprising:

[0208] (a) a first vector comprising (i) a nucleotide sequence encoding an N-terminal fragment of a fluorescent protein, which is upstream from a nucleotide sequence encoding an N-terminal fragment of a first intein and (ii) a nucleotide sequence encoding a first molecule of interest,

[0209] (b) a second vector comprising (i) a nucleotide sequence encoding a C-terminal fragment of the first intein, which is upstream from a nucleotide sequence encoding a central fragment of the fluorescent protein, which is upstream from a nucleotide sequence encoding an N-terminal fragment of a second intein and (ii) a nucleotide sequence encoding a second molecule of interest, and

[0210] (c) a third vector comprising (i) a nucleotide sequence encoding a C-terminal fragment of the second intein, which is upstream from a nucleotide sequence encoding a C-terminal fragment of the fluorescent protein and (ii) a nucleotide sequence encoding a third molecule of interest,

[0211] wherein the N-terminal fragment and the C-terminal fragment of the first intein catalyze joining of N-terminal fragment of the fluorescent protein to the central fragment of the fluorescent protein, and the N-terminal fragment and the C-terminal fragment of the second intein catalyze joining of central fragment of the fluorescent protein to the C-terminal fragment of the fluorescent protein, to produce a full-length fluorescent protein.

188. The eukaryotic cell of paragraph 187 wherein the eukaryotic cells are mammalian cells.
189. The eukaryotic cell of paragraph 187 or 188, wherein the fluorescent protein is selected from TagCFP, mTagCFP2, Czurite, ECFP2, mKalama1, Sirius, Sapphire, T-Sapphire, ECFP, Cerulean, SCFP3C, mTurquoise, mTurquoise2, monomeric Midoriishi-Cyan, TagCFP, mTFP1, EGFP, Emerald, Superfolder GFP, Monomeric Czami Green, TagGFP2, mUKG, mWasabi, Clover, mNeonGreen, EYFP, Citrine, Venus, SYFP2, TagYFP, Monomeric Kusabira-Orange, mKOK, mScarlet, mKO2, mOrange, mOrange2, mRaspberry, mCherry, mStrawberry, mTangerine, tdTomato, TagRFP, TagRFP-T, mCpple, mRuby, mRuby2, mPlum, HcRed-Tandem, mKate2, mNeptune, NirFP, TagRFP657, IFP1.4 and iRFP.
190. The eukaryotic cell of paragraph 189, wherein the fluorescent protein is mScarlet.
191. The eukaryotic cell of any one of paragraphs 187-190, wherein the first intein is a split intein.
192. The eukaryotic cell of any one of paragraphs 185-191, wherein the second intein is a split intein.
193. The eukaryotic cell of paragraph 191 or 192, wherein the split intein is a natural split intein.
194. The eukaryotic cell of paragraph 193, wherein the natural split intein is selected from DnaE inteins.
195. The eukaryotic cell of paragraph 194, wherein the DnaE inteins are selected from Synechocystis sp. DnaE (SspDnaE) inteins and Nostoc punctiforme (NpuDnaE) inteins.
196. The eukaryotic cell of paragraph 195, wherein the first intein is an NpuDnaE intein and the second intein is an NpuDnaE intein.
197. The eukaryotic cell of any one of paragraphs 185-196, wherein the first molecule of interest, second molecule of interest, third molecule of interest, or any combination thereof is a protein.
198. The eukaryotic cell of any one of paragraphs 185-196, wherein the first molecule of interest, second molecule of interest, third molecule of interest, or any combination thereof is a non-coding ribonucleic acid (RNA).
199. The eukaryotic cell of paragraph 198, wherein the non-coding RNA is a microRNA (miRNA), antisense RNA, short-interfering RNA (siRNA) or short-hairpin RNA (shRNA).
200. The eukaryotic cell of any one of paragraphs 185-199, wherein the first vector, second vector, third vector, or any combination thereof, is a plasmid vector or a viral vector.
201. A composition comprising the eukaryotic cell of any one of paragraph 185-200.
202. A kit comprising:

[0212] (a) a first vector comprising a nucleotide sequence encoding an N-terminal fragment of a fluorescent protein, which is upstream from a nucleotide sequence encoding an N-terminal fragment of a first intein,

[0213] (b) a second vector comprising a nucleotide sequence encoding a C-terminal fragment of the first intein, which is upstream from a nucleotide sequence encoding a central fragment of the fluorescent protein, which is upstream from a nucleotide sequence encoding an N-terminal fragment of a second intein, and

[0214] (c) a third vector comprising a nucleotide sequence encoding a C-terminal fragment of the second intein, which is upstream from a nucleotide sequence encoding a C-terminal fragment of the fluorescent protein,

[0215] wherein the N-terminal fragment and the C-terminal fragment of the first intein catalyze joining of N-terminal fragment of the fluorescent protein to the central fragment of the fluorescent protein, and the N-terminal fragment and the C-terminal fragment of the second intein catalyze joining of central fragment of the fluorescent protein to the C-terminal fragment of the fluorescent protein, to produce a full-length fluorescent protein.

203. The kit of paragraph 202, wherein the fluorescent protein is selected from TagCFP, mTagCFP2, Czurite, ECFP2, mKalama1, Sirius, Sapphire, T-Sapphire, ECFP, Cerulean, SCFP3C, mTurquoise, mTurquoise2, monomeric Midoriishi-Cyan, TagCFP, mTFP1, EGFP, Emerald, Superfolder GFP, Monomeric Czami Green, TagGFP2, mUKG, mWasabi, Clover, mNeonGreen, EYFP, Citrine, Venus, SYFP2, TagYFP, Monomeric Kusabira-Orange, mKOK, mScarlet, mKO2, mOrange, mOrange2, mRaspberry, mCherry, mStrawberry, mTangerine, tdTomato, TagRFP, TagRFP-T, mCpple, mRuby, mRuby2, mPlum, HcRed-Tandem, mKate2, mNeptune, NirFP, TagRFP657, IFP1.4 and iRFP.
204. The kit of paragraph 203, wherein the fluorescent protein is mScarlet.
205. The kit of any one of paragraphs 202-204, wherein the first intein is a split intein.
206. The kit of any one of paragraphs 202-205, wherein the second intein is a split intein.
207. The kit of paragraph 206, wherein the split intein is a natural split intein.
208. The kit of paragraph 207, wherein the natural split intein is selected from DnaE inteins.
209. The kit of paragraph 208, wherein the DnaE inteins are selected from Synechocystis sp. DnaE (SspDnaE) inteins and Nostoc punctiforme (NpuDnaE) inteins.
210. The kit of paragraph 209, wherein the first intein is an NpuDnaE intein and the second intein is an NpuDnaE intein.
211. The kit of any one of paragraphs 202-210, wherein the first molecule of interest, second molecule of interest, third molecule of interest, or any combination thereof is a protein.
212. The kit of any one of paragraphs 202-210, wherein the first molecule of interest, second molecule of interest, third molecule of interest, or any combination thereof is a non-coding ribonucleic acid (RNA).
213. The kit of paragraph 212, wherein the non-coding RNA is a microRNA (miRNA), antisense RNA, short-interfering RNA (siRNA) or short-hairpin RNA (shRNA).
214. The kit of any one of paragraphs 202-213, wherein the first vector, second vector, third vector, or any combination thereof, is a plasmid vector or a viral vector.
215. The kit of any one of paragraphs 202-214, further comprising any one or more of the following components: buffers, salts, cloning enzymes, competent cells, transfection reagents, antibiotics, and/or instructions for performing the methods described herein.
216. A transgenic selection method comprising delivering to a composition comprising eukaryotic cells (a) a first vector comprising (i) a nucleotide sequence encoding a first selectable marker protein fragment (e.g., antibiotic resistance protein fragment or fluorescent protein fragment) upstream from a nucleotide sequence encoding an N-terminal intein protein fragment and (ii) a nucleotide sequence encoding a first molecule, and (b) a second vector comprising (i) a nucleotide sequence encoding a C-terminal intein protein fragment upstream from a second selectable marker protein fragment (e.g., antibiotic resistance protein fragment or fluorescent protein fragment) and (ii) a nucleotide sequence encoding a second molecule, wherein the N-terminal intein protein fragment and the C-terminal intein protein fragment catalyze joining of the first selectable marker protein fragment to the second selectable marker protein fragment to produce a full-length selectable marker protein.
217. A transgenic selection method comprising delivering to eukaryotic cells (a) a first vector comprising (i) a nucleotide sequence encoding an N-terminal fragment of a selectable marker protein (e.g., antibiotic resistance protein or fluorescent protein), which is upstream from a nucleotide sequence encoding an N-terminal fragment of a first intein and (ii) a nucleotide sequence encoding a first molecule of interest, (b) a second vector comprising (i) a nucleotide sequence encoding a C-terminal fragment of the first intein, which is upstream from a nucleotide sequence encoding a central fragment of the selectable marker protein, which is upstream from a nucleotide sequence encoding an N-terminal fragment of a second intein and (ii) a nucleotide sequence encoding a second molecule of interest, and (c) a third vector comprising (i) a nucleotide sequence encoding a C-terminal fragment of the second intein, which is upstream from a nucleotide sequence encoding a C-terminal fragment of the selectable marker protein and (ii) a nucleotide sequence encoding a third molecule of interest, wherein the N-terminal fragment and the C-terminal fragment of the first intein catalyze joining of N-terminal fragment of the selectable marker protein to the central fragment of the selectable markerprotein, and the N-terminal fragment and the C-terminal fragment of the second intein catalyze joining of central fragment of the selectable markerprotein to the C-terminal fragment of the selectable markerprotein, to produce a full-length selectable markerprotein.
218. A transgenic selection method comprising delivering to eukaryotic cells (a) a first vector comprising (i) a nucleotide sequence encoding an N-terminal fragment of a selectable marker protein (e.g., antibiotic resistance protein or fluorescent protein), which is upstream from a nucleotide sequence encoding an N-terminal fragment of a first intein and (ii) a nucleotide sequence encoding a first molecule of interest, (b) a second vector comprising (i) a nucleotide sequence encoding a C-terminal fragment of the first intein, which is upstream from a nucleotide sequence encoding a first central fragment of the selectable marker protein, which is upstream from a nucleotide sequence encoding an N-terminal fragment of a second intein and (ii) a nucleotide sequence encoding a second molecule of interest, (c) a third vector comprising (i) a nucleotide sequence encoding a C-terminal fragment of the second intein, which is upstream from a nucleotide sequence encoding a second central fragment of the selectable marker protein, which is upstream from a nucleotide sequence encoding an N-terminal fragment of a third intein and (ii) a nucleotide sequence encoding a third molecule of interest, and (d) a fourth vector comprising (i) a nucleotide sequence encoding a C-terminal fragment of the third intein, which is upstream from a nucleotide sequence encoding a C-terminal fragment of the selectable marker protein and (ii) a nucleotide sequence encoding a third molecule of interest, wherein the N-terminal fragment and the C-terminal fragment of the first intein catalyze joining of N-terminal fragment of the selectable marker protein to the first central fragment of the selectable marker protein, the N-terminal fragment and the C-terminal fragment of the second intein catalyze joining of first central fragment of the selectable marker protein to the second central fragment of the selectable marker protein, the N-terminal fragment and the C-terminal fragment of the third intein catalyze joining of second central fragment of the selectable marker protein to the C-terminal fragment of the selectable marker protein to produce a full-length selectable marker protein.
219. The method of any one of paragraphs 216-218 further comprising maintaining the eukaryotic cells under conditions that permit introduction of the vectors into the eukaryotic cells to produce transgenic eukaryotic cells.
220. The method of paragraph 219 further comprising selecting the transgenic eukaryotic cells that comprise the full-length selectable marker protein.
221. The method of any one of paragraphs 216-220, wherein the eukaryotic cells are mammalian cells.
222. The method of any one of paragraphs 216-221, wherein the antibiotic resistance protein confers resistance to hygromycin, G418, puromycin, phleomycin D1 or blasticidin.
223. The method of any one of paragraphs 216-222, wherein the intein is a split intein.
224. The method of paragraph 223, wherein the split intein is a natural split intein.
225. The method of paragraph 224, wherein the natural split intein is selected from DnaE inteins.
226. The method of paragraph 225, wherein the DnaE inteins are selected from Synechocystis sp. DnaE (SspDnaE) inteins and Nostoc punctiforme (NpuDnaE) inteins.
227. The method of paragraph 223, wherein the split intein is an engineered split intein.
228. The method of paragraph 2278, wherein the engineered split intein is engineered from DnaB inteins.
229. The method of paragraph 228, wherein the engineered split intein is a SspDnaB S1 intein.
230. The method of paragraph 229, wherein the engineered split intein is engineered from GyrB inteins.
231. The method of paragraph 230, wherein the engineered split intein is a SspGyrB S11 intein.
232. The method of any one of paragraphs 216-231, wherein the molecules are selected from proteins.
233. The method of any one of paragraphs 216-231, wherein the molecules are selected from non-coding ribonucleic acids (RNAs).
234. The method of paragraph 233, wherein the non-coding RNAs are selected from microRNAs (miRNAs), antisense RNAs, short-interfering RNAs (siRNAs), and short-hairpin RNAs (shRNAs).
235. The method of any one of paragraphs 216-234, wherein the vectors are selected from plasmid vectors and viral vectors.

### EXAMPLES

[0216] The present disclosure is further illustrated by the following Examples. These Examples are provided to aid in the understanding of the disclosure, and should not be construed as a limitation thereof.

### Example 1. Antiobiotic Resistance Markers

[0217] Selectable markers are often used in genetic engineering to isolate cells with desired genotypes [1]. However, there are a limited number of well-characterized antibiotic resistance genes for use in eukaryotic cells and a limited number of fluorescent proteins whose spectra can be unambiguously differentiated by equipment in ordinary laboratories. Researchers often run into the problem of not having enough choices of selectable markers if they are to incorporate multiple transgenes into a cell. On the other hand, selection with multiple antibiotics at the same time is often harsh to cells. “Selectable marker recycling” may provide a work-around, however, requiring multiple rounds of transgenesis, selection and removal of selection markers [2]. To allow multiple transgenes to be selected by one selection scheme at the same time, we have created split antibiotics resistance and fluorescent protein genes wherein a gene encoding an antibiotic resistance or fluorescent protein is split into two or more segments fused to inteins (“markertrons”) that can be rejoined by protein trans-splicing [3] (FIG. 1A). Each markertron is inserted onto a transgenic vector carrying a specific transgene. Delivery of transgenic vectors containing a set of markertrons yield cells harboring a subset or a complete set of the marketrons. Only cells containing a complete set of markertrons produce a fully reconstituted marker protein via protein splicing and thus passes through selection while cells with partial sets of markertrons are eliminated, achieving co-selection of cells containing all intended transgenes.

[0218] We started out with engineering 2-markertron intein-split resistance (Intres) genes for double transgenesis. Since flanking residues and local protein folding can affect efficiency of intein-mediated trans-splicing, we set out to identify split points in each of the four commonly used antibiotic resistance genes compatible with two well-characterized split inteins derived from NpuDnaE [4, 5] and SspDnaB [6]. To facilitate assessment of the effectiveness of double transgenic selection, we cloned markertrons onto lentiviral vectors expressing TagBFP2 or mCherry fluorescent proteins as test transgenes (FIG. 1B). Viral preparations were transduced into U2OS cells which were then split into replicate plates with non-selective or selective media. Following appropriate passages for antibiotics selection, the two cell cultures were analyzed by flow cytometry. For hygromycin (Hygro) resistance gene, one “native” SspDnaB split point (G200:S201) with flanking residues “GS” and one “native” NpuDnaE split point (Y89:C90) with “YC” residues were tested. Both enabled successful selection when both N- and C-markertrons were transduced yielding >99% BFP+ mCherry+ double transgenic cells in selected cultures compared to <10% double-positive cells in non-selected culture (FIG. 3; Plasmid pairs 3,4 and 5,6). Cells transduced with either of the two markertrons did not survive hygromycin selection. In contrast, double transgenesis with conventional full-length non-split hygromycin vectors only allow for ˜20% enrichment of BFP+ mCherry+ cells (Plasmid pairs 97,98). We screened three addition potential split points (52S:53C), (240A:241C), and (292R:293C) for NpuDnaE with the obligatory cysteine residue on the C-extein junction and a residue on the N-extein junction that supported substantial trans-splicing activities in a previous report 7. We also incorporated six additional NpuDnaE split points by inserting an “artificial” cysteine on the C-extein junction to support splicing at ectopic sites yielding additional split points. In total, eight out of eleven split points tested supported hygromycin selection (FIG. 3). Similarly, for puromycin (Puro) (FIG. 4), neomycin (Neo) (FIG. 5) and blasticidin (Blast) (FIG. 6) resistance genes, we identified four, two, and one functional Intres pair(s), respectively. In all of these cases, cells transduced with either markertrons did not survive selection, while cells transduced with both yielded >95% double transgenic cells in selective cultures compared to <50% in non-selective cultures with the exception of Blasticidin(102) Intres, achieving lower but still significant enrichment of 91% double transgenic cells (FIGS. 3-6). Details of the split points of Intres genes and plasmids are presented in FIGS. 2A-2D and Table 1.

TABLE 1
Plasmids

| Plasmid #* | Plasmid Name | Markertron |
|---|---|---|
| 3 | pLX-Hygro(1-89)-NpuDnaE(N)-IRES-TagBFP2 | Hygro(1-89)-NpuDnaE(N) |
| 4 | pLX-NpuDnaE(C)-Hygro(90-341)-IRES-mCherry | NpuDnaE(C)-Hygro(90-341) |
| 5 | pLX-Hygro(1-200)-SspDnaB(N)-IRES-TagBFP2 | Hygro(1-200)-SspDnaB(N) |
| 6 | pLX-SspDnaB(C)-Hygro(201-341)-IRES-mCherry | SspDnaB(C)-Hygro(201-341) |
| 7 | pLX-Hygro(1-52)-NpuDnaE(N)-IRES-TagBFP2 | Hygro(1-52)-NpuDnaE(N) |
| 8 | pLX-NpuDnaE(C)-Hygro(53-341)-IRES-mCherry | NpuDnaE(C)-Hygro(53-341) |
| 9 | pLX-Hygro(1-240)-NpuDnaE(N)-IRES-TagBFP2 | Hygro(1-240)-NpuDnaE(N) |
| 10 | pLX-NpuDnaE(C)-Hygro(241-341)-IRES-mCherry | NpuDnaE(C)-Hygro(241-341) |
| 11 | pLX-Hygro(1-292)-NpuDnaE(N)-IRES-TagBFP2 | Hygro(1-292)-NpuDnaE(N) |
| 12 | pLX-NpuDnaE(C)-Hygro(293-341)-IRES-mCherry | NpuDnaE(C)-Hygro(293-341) |
| 13 | pLX-Blast(1-102)-NpuDnaE(N)-IRES-TagBFP2 | Blast(1-102)-NpuDnaE(N) |
| 14 | pLX-NpuDnaE(C)-Blast(103-140)-IRES-mCherry | NpuDnaE(C)-Blast(103-140) |
| 17 | pLX-Puro(1-119)-NpuDnaE(N)-IRES-TagBFP2 | Puro(1-119)-NpuDnaE(N) |
| 18 | pLX-NpuDnaE(C)-Puro(insCys; 120-199)-IRES-mCherry | NpuDnaE(C)-Puro(insCys; 120-199) |
| 19 | pLX-Puro(1-100)-SspDnaB(N-S0)-IRES-TagBFP2 | Puro(1-100)-SspDnaB(N-S0) |
| 20 | pLX-SspDnaB(C-S0)-Puro(101-199)-IRES-mCherry | SspDnaB(C-S0)-Puro(101-199) |
| 21 | pLX-Neo(1-133)-NpuDnaE(N)-IRES-TagBFP2 | Neo(1-133)-NpuDnaE(N) |
| 22 | pLX-NpuDnaE(C)-Neo(134-267)-IRES-mCherry | NpuDnaE(C)-Neo(134-267) |
| 23 | pLX-Neo(1-194)-NpuDnaE(N)-IRES-TagBFP2 | Neo(1-194)-NpuDnaE(N) |
| 24 | pLX-NpuDnaE(C)-Neo(195-267)-IRES-mCherry | NpuDnaE(C)-Neo(195-267) |
| 25 | pLX-NpuDnaE(C)_Hygro(53-89)-NpuDnaE(N)-IRES-GFP | NpuDnaE(C)_Hygro(53-89)-NpuDnaE(N) |
| 26 | pLX-NpuDnaE(C)_Hygro(53-239)-NpuDnaE(N)-IRES-GFP | NpuDnaE(C)_Hygro(53-239)-NpuDnaE(N) |
| 27 | pCR8-BsaI−>ccdbCam<−BsaI-NpuDnaE(N)-MD1-68-15 | |
| 28 | pCR8-NpuDnaE(C)_BsaI−>ccdbCam<−BsaI-MD1-68-18 | |
| 29 | pCR8-BsaI−>ccdbCam<−BsaI-SspDnaE(N)-MD1-68-12 | |
| 30 | pCR8-SspDnaE(C)_BsaI−>ccdbCam<−BsaI-MD1-68-13 | |
| 31 | pCR8-BsaI−>ccdbCam<−BsaI-SspDnaB(N-S0)-25-135-18 | |
| 32 | pCR8-SspDnaB(C-S0)_BsaI−>ccdbCam<−BsaI-25-155-41 | |
| 33 | pLX-mScarlet(1-46)-NpuDnaE(N)_LZA-IRES-TagBFP2 | mScarlet(1-46)-NpuDnaE(N)_LZA |
| 34 | pLX-LZB_NpuDnaE(C)-mScarlet(insCys; 47-232)-IRES- | LZB_NpuDnaE(C)-mScarlet(insCys; 47-232) |
| | TagBFP2 | |
| 35 | pLX-mScarlet(1-48)-NpuDnaE(N)_LZA-IRES-TagBFP2 | mScarlet(1-48)-NpuDnaE(N)_LZA |
| 36 | pLX-LZB_NpuDnaE(C)-mScartet(insCys; 49-232)-IRES-GFP | LZB_NpuDnaE(C)-mScarlet(insCys; 49-232) |
| 37 | pLX-mScarlet(1-51)-NpuDnaE(N)_LZA-IRES-TagBFP2 | mScarlet(1-51)-NpuDnaE(N)_LZA |
| 38 | pLX-LZB_NpuDnaE(C)-mScarlet(insCys; 52-232)-IRES-GFP | LZB_NpuDnaE(C)-mScarlet(insCys; 52-232) |
| 39 | pLX-mScarlet(1-75)-NpuDnaE(N)_LZA-IRES-TagBFP2 | mScarlet(1-75)-NpuDnaE(N)_LZA |
| 40 | pLX-LZB_NpuDnaE(C)-mScarlet(insCys; 76-232)-IRES-GFP | LZB_NpuDnaE(C)-mScarletflnsCys; 76-232) |
| 41 | pLX-mScarlet(1-122)-NpuDnaE(N)_LZA-IRES-TagBFP2 | mScarlet(1-122)-NpuDnaE(N)_LZA |
| 42 | pLX-LZB_NpuDnaE(C)-mScarlet(insCys; 123-232)-IRES-GFP | LZB_NpuDnaE(C)-mScarlet(insCys; 123- |
| | | 232) |
| 43 | pLX-mScarlet(1-140)-NpuDnaE(N)_LZA-IRES-TagBFP2 | mScarlet(1-140)-NpuDnaE(N)_LZA |
| 44 | pLX-LZB_NpuDnaE(C)-mScarlet(insCys; 141-232)-IRES-GFP | LZB_NpuDnaE(C)-mScarlet(insCys; 141- |
| | | 232) |
| 45 | pLX-mScarlet(1-163)-NpuDnaE(N)_LZA-IRES-TagBFP2 | mScarlet(1-163)-NpuDnaE(N)_LZA |
| 46 | pLX-LZB_NpuDnaE(C)-mScarlet(insCys; 164-232)-IRES-GFP | LZB_NpuDnaE(C)-mScarlet(insCys; 164- |
| | | 232) |
| 47 | pCR8-TagBFP2 | TagBFP2 |
| 48 | pCR8-mCherry | mCherry |
| 49 | pLX-DEST-IRES-Hygro(1-89)-NpuDnaE(N) | Hygro(1-89)-NpuDnaE(N) |
| 50 | pLX-DEST-IRES-NpuDnaE(C)-Hygro(90-341) | NpuDnaE(C)-Hygro(90-341) |
| 51 | pLX-[TagBFP2]-IRES-Hygro(1-89)-NpuDnaE(N) | Hygro(1-89)-NpuDnaE(N) |
| 52 | pLX-[mCherry]-IRES-NpuDnaE(C)-Hygro(90-341) | NpuDnaE(C)-Hygro(90-341) |
| 53 | pLX-DEST-IRES-Puro(1-119)-NpuDnaE(N) | Puro(1-119)-NpuDnaE(N) |
| 54 | pLX-DEST-IRES-NpuDnaE(C)-Puro(120-199) | NpuDnaE(C)-Puro(insCys; 120-199) |
| 55 | pLX-[TagBFP2]-IRES-Puro(1-119)-NpuDnaE(N) | Puro(1-119)-NpuDnaE(N) |
| 56 | pLX-[mCherry]-IRES-NpuDnaE(C)-Puro(120-199) | NpuDnaE(C)-Puro(insCys; 120-199) |
| 57 | pLX-DEST-IRES-Neo(1-194)-NpuDnaE(N) | Neo(1-194)-NpuDnaE(N) |
| 58 | pLX-DEST-IRES-NpuDnaE(C)-Neo(195-267) | NpuDnaE(C)-Neo(195-267) |
| 59 | pLX-[TagBFP2]-IRES-Neo(1-194)-NpuDnaE(N) | Neo(1-194)-NpuDnaE(N) |
| 60 | pLX-[mCherry]-IRES-NpuDnaE(C)-Neo(195-267) | NpuDnaE(C)-Neo(195-267) |
| 64 | pLX-Hygro(1-69)-NpuDnaE(N)-IRES-TagBFP2 | Hygro(1-69)-NpuDnaE(N) |
| 65 | pLX-NpuDnaE(C)-Hygro(\hat{ }C; 70-341)-IRES-mCherry | NpuDnaE(C)-Hygro(\hat{ }C; 70-341) |
| 66 | pLX-Hygro(1-131)-NpuDnaE(N)-IRES-TagBFP2 | Hygro(1-131)-NpuDnaE(N) |
| 67 | pLX-NpuDnaE(C)-Hygro(\hat{ }C; 132-341)-IRES-mCheny | NpuDnaE(C)-Hygro(\hat{ }C; 132-341) |
| 68 | pLX-Hygro(1-171)-NpuDnaE(N)-IRES-TagBFP2 | Hygro(1-171)-NpuDnaE(N) |
| 69 | pLX-NpuDnaE(C)-Hygro(\hat{ }C; 172-341)-IRES-mCherry | NpuDnaE(C)-Hygro(\hat{ }C; 172-341) |
| 70 | pLX-Hygro(1-218)-NpuDnaE(N)-IRES-TagBFP2 | Hygro(1-218)-NpuDnaE(N) |
| 71 | pLX-NpuDnaE(C)-Hygro(\hat{ }C; 219-341)-IRES-mCherry | NpuDnaE(C)-Hygro(\hat{ }C; 219-341) |
| 72 | pLX-Hygro(1-259)-NpuDnaE(N)-IRES-TagBFP2 | hygro(1-259)-NpuDnaE(N) |
| 73 | pLX-NpuDnaE(C)-Hygro(\hat{ }C; 260-341)-IRES-mCherry | NpuDnaE(C)-Hygro(\hat{ }C; 260-341) |
| 74 | pLX-Hygro(1-277)-NpuDnaE(N)-IRES-TagBFP2 | Hygro(1-277)-NpuDnaE(N) |
| 75 | pLX-NpuDnaE(C)-Hygro(\hat{ }C; 278-341)-IRES-mCherry | NpuDnaE(C)-Hygro(\hat{ }C; 278-341) |
| 76 | pLX-Puro(1-32)-NpuDnaE(N)-IRES-TagBFP2 | Puro(1-32)-NpuDnaE(N) |
| 77 | pLX-NpuDnaE(C)-Puro(\hat{ }C; 33-199)-IRES-mCherry | NpuDnaE(C)-Puro(\hat{ }C; 33-199) |
| 78 | pLX-Puro(1-84)-NpuDnaE(N)-IRES-TagBFP2 | Puro(1-84)-NpuDnaE(N) |
| 79 | pLX-NpuDnaE(C)-Puro(\hat{ }C; 85-199)-IRES-mCherry | NpuDnaE(C)-Puro(\hat{ }C; 85-199) |
| 80 | pLX-Puro(1-137)-NpuDnaE(N)-IRES-TagBFP2 | Puro(1-137)-NpuDnaE(N) |
| 81 | pLX-NpuDnaE(C)-Puro(\hat{ }C; 138-199)-IRES-mCherry | NpuDnaE(C)-Puro(\hat{ }C; 138-199) |
| 82 | pLX-Puro(1-158)-NpuDnaE(N)-IRES-TagBFP2 | Puro(1-158)-NpuDnaE(N) |
| 83 | pLX-NpuDnaE(C)-Puro(\hat{ }C; 159-199)-IRES-mCherry | NpuDnaE(C)-Puro(\hat{ }C; 159-199) |
| 84 | pLX-Puro(1-180)-NpuDnaE(N)-IRES-TagBFP2 | Puro(1-180)-NpuDnaE(N) |
| 85 | pLX-NpuDnaE(C)-Puro(\hat{ }C; 181-199)-IRES-mCherry | NpuDnaE(C)-Puro(\hat{ }C; 181-199) |
| 86 | pLX-Blast(1-58)-NpuDnaE(N)-IRES-TagBFP2 | Blast(1-58)-NpuDnaE(N) |
| 87 | pLX-NpuDnaE(C)-Blast(59-140)-IRES-mCherry | NpuDnaE(C)-Blast(59-140) |
| 88 | pLX-NpuDnaE(C)-HygroBA-SspDnaB(N-S0)-IRES-EGFP | NpuDnaE(C)-Hygro(53-200)-SspDnaB(N- |
| | | S0) |
| 89 | pLX-SspDnaB(C-S0)-Hygro(201-341)-IRES-mCherry | SspDnaB(C-S0)-Hygro(201-341) |
| 90 | pLX-NpuDnaE(C)-Hygro(90-200)-SspDnaB(N-S0)-IRES- | NpuDnaE(C)-Hygro(90-200)-SspDnaB(N- |
| | EGFP | S0) |
| 91 | pLX-Hygro(1-200)-SspDnaB(N-S0)-IRES-TagBFP2 | Hygro(1-200)-SspDnaB(N-S0) |
| 92 | pLX-SspDnaB(C-S0)-Hygro(201-240)-NpuDnaE(N)-IRES- | SspDnaB(C-S0)-Hygro(201-240)- |
| | EGFP | NpuDnaE(N) |
| 93 | pLX-SspDnaB(C-S0)-Hygro(201-292)-NpuDnaE(N)-IRES- | SspDnaB(C-S0)-Hygro(201-292)- |
| | EGFP | NpuDnaE(N) |
| 94 | pLX-DEST-IRES-TagBFP2 | |
| 95 | pLX-DEST-IRES-EGFP | |
| 96 | pLX-DEST-IRES-mCherry | |
| 97 | pLX-Hygro-IRES-TagBFP2 | Non-split Hygro |
| 98 | pLX-Hygro-IRES-mCherry | Non-split Hygro |
| 99 | pLX-Puro-IRES-TagBFP2 | Non-split Puro |
| 100 | pLX-Puro-IRES-mCherry | Non-split Puro |
| 101 | pLX-Hygro-IRES-EGFP | Non-split Hygro |
| 102 | pLX-NLS_GFP-IRES-Hygro | Non-split Hygro |
| 103 | pLX-LifeAct_mCherry-IRES-Hygro | Non-split Hygro |
| 104 | pLX-NLS_GFP-IRES-Hygro(1-89)-NpuDnaE(N) | Hygro(1-89)-NpuDnaE(N) |
| 105 | pLX-LifeAct_mScarlet-IRES- NpuDnaE(C)-Hygro(90-341) | NpuDnaE(C)-Hygro(90-341) |
| 106 | pX330-AAVS1 | |
| 107 | pAAVS1-Nst-EF1aHygro2ArtTA3(−)_TetO-Blast-P2A-EGFP | Non-split Blast |
| 108 | pAAVS1-Nst-EF1aHygro2ArtTA3(−)_TetO-Blast-P2A-mScarlet | Non-split Blast |
| 109 | pAAVS1-Nst-EF1aHygro2ArtTA3(−)_TetO-Blast(1- | Blast(1-102)-NpuDnaE(N) |
| | 102)_NpuDnaE(N)-P2A-EGFP | |
| 110 | pAAVS1-Nst-EF1aHygro2ArtTA3(−)_TetO- | NpuDnaE(C)-Blast(103-140) |
| | NpuDnaE(C)_Blast(103-140)-P2A-mScarlet | |
| 111 | pAAVS1-Nst-EF1aBlast2ArtTA3(−)_TetO-Hygro-P2A-NTR- | Non-split Hygro |
| | E2A-EGFP | |
| 112 | pAAVS1-Nst-EF1aBlast2ArtTA3(−)_TetO-Hygro-P2A-NTR- | Non-split Hygro |
| | E2A-mCherry | |
| 113 | pAAVS1-Nst-EF1aBlast2ArtTA3(−)_TetO- Hygro(1-89)- | Hygro(1-89)-NpuDnaE(N) |
| | NpuDnaE(N)-P2A-NTR-E2A-EGFP | |
| 114 | pAAVS1-Nst-EF1aBlast2ArtTA3(−)_TetO- NpuDnaE(C)- | NpuDnaE(C)-Hygro(90-341) |
| | Hygro(90-341)-P2A-NTR-E2A-mCherry | |
| 115 | pLX-Hygro(1-89)_NpuDnaE(N)_LZA-IRES-TagBFP2 | Hygro(1-89)-NpuDnaE(N)-LZA |
| 116 | pLX-LZB_NpuDnaGEP(C)_Hygro(90-200)_SspDnaB(N-S0)- | LZB-NpuDnaGEP(C)-Hygro(90-200)- |
| | IRES-GFP | SspDnaB(N-S0) |
| 117 | pLX-SspDnaB(C-S0)_Hygro(201-240)_NpuDnaE(N)_LZA- | SspDnaB(C-S0)-Hygro(201-240)- |
| | IRES-GFP | NpuDnaE(N)-LZA |
| 118 | pLX-LZB_NpuDnaGEP(C)_Hygro(241-341 )-IRES-mCherry | LZB-NpuDnaGEP(C)-Hygro(241-341) |

### Example 2. Gateway-Compatible Lentiviral Vectors

[0219] To facilitate adoption of Intres markers, we created Gateway-compatible lentiviral vectors for convenient restriction-ligation-independent LR clonase recombination of transgenes 8 (FIG. 7A). We tested the functionality of these vectors by recombining TagBPF2 and mCherry, respectively to the N- and C-Intres vectors and found robust selection of double transgenic cells (FIG. 7B). One potential utility of Intres vectors is to install different fluorescent markers in cells to label different cellular compartments. To explore such utility, we cloned in NLS-GFP and LifeAct-mScarlet 9, which label nucleus and F-actin, respectively, by Gateway recombination to conventional full length (FL) non-split hygromycin selectable vectors or 2-markertron hygromycin Intres vectors and transduced cells with either sets of plasmids, followed by antibiotic selection (FIG. 7C). The sample transduced with non-split selectable plasmids contained both singly and doubly labelled cells, while cell transduced with Intres plasmids were all doubly labelled (FIG. 7C).

### Example 3. Fluorescent Markers

[0220] To test whether split fluorescent markers can be used for transgene selection, we screened for NpuDnaE split points for mScarlet fluorescent protein (FIG. 8A) and identified four split points allowing for >96% enrichment of double transgenic cells and three other split points enabling >60% enrichment of double transgenic cells in mScarlet-gated population, compared to <20% double transgenic cells in non-gated population (FIG. 8B).

### Example 4. Higher Degree Split Markers

[0221] With the split points identified for 2-markertron Intres genes, we set out to engineer higher degree split markers. We tested combinations of splits points to partition a marker gene into three or more markertrons to allow for co-selection of more than two “unlinked” transgenes with one antibiotics (FIGS. 9A-9B). To identify pairs of split points that would allow such “Intres chain”, we cloned 3-split markertrons into three lentiviral vectors each carrying one of three fluorescent transgenes TagBFP2, EGFP, or mCherry, that will allow us to assess effectiveness of selection by flow cytometry (FIG. 9C). Since hygromycin resistance gene is the longest and provides the most split points for testing, we focused on engineering 3-markertron hygromycin Intres. We tested two 3-markertron hygromycin Intres using two intervening NpuDnaE inteins, two using NpuDnaE for the first intein and SspDnaB for the second intein, as well as two using SspDnaB for the first intein and NpuDnaE for the second intein (FIG. 9D). Five of these six 3-markertron hygromycin Intres enabled >97% and with the remaining one enabling 80% triple transgenic selection in hygromycin-selected cultures compared to <15% triple transgenic cells in non-selected cultures. Samples with leave-one-out transduction did not yield any viable cells after hygromycin selection while cells transduced with non-split hygromycin vectors yielded only 7% triple transgenic cells after selection.

[0222] To facilitate the use of 3-markertron Intres, we created Gateway compatible lentiviral vectors with these markers (FIG. 10A). Three sets of these vectors were each tested by recombining TagBFP (as transgene 1), EGFP (as transgene 2) and mCherry (as transgene 3) into the N-, M-, and C-Intres Gateway destination vectors and used to transduce U2OS cells, which were then split and cultured in hygromycin selection or non-selective media (FIG. 10B). Two weeks after selection, cells were analyzed by flow cytometry. All three sets of 3-markertron hygromycin Intres plasmids support triple transgenic cell selection of >99% compared to <25% in the non-selected cultures (FIG. 10C).

[0223] We further tested the feasibility of 4-markertron hygromycin Intres genes (FIG. 11). Here, we used an enhanced variant of NpuDnaE intein known as NpuDnaGEP 10 fused with leucine zipper motifs 11 in combination with the SspDnaB intein. While transduction of all four plasmids containing constituent markertrons produced cells that survived hygromycin selection, leave-one-out transduction did not yield any survival (Table 2).

TABLE 2
Survival of cells transduced with (“+”) or without (“−”) lentiviruses
prepared from the indicated plasmids.

| | Plasmid | Plasmid | Plasmid | Plasmid | |
|---|---|---|---|---|---|
| | 115 | 116 | 117 | 118 | Survival |
| Sample 1 | + | + | + | + | Yes |
| Sample 2 | − | + | + | + | No |
| Sample 3 | + | − | + | + | No |
| Sample 4 | + | + | − | + | No |
| Sample 5 | + | + | + | − | No |

### Example 5. Biallelic Knock-In at the AAVS1 Locus

[0224] CRISPR/Cas has recently emerged as a powerful technology for genome engineering and editing. Although gene knockout based on NHEJ-mediated insertions/deletions (indels) occur at high frequency, precise editing and knock-in based on homology directed repair (HDR) using exogenous repair templates (a.k.a targeting constructs) are inefficient. We tested whether split selectable markers can be used to enrich for cells with biallelic knock-in at the AAVS1 locus. We constructed targeting constructs with homology arms flanking the target site, and splice acceptor-2A peptide to trap the markertrons within intron one of the host gene PPP1R12C. However, we did not obtain any live cells after CRISPR/Cas knock-in experiments using these targeting constructs and two weeks of antibiotic selection (data not shown). We suspected that the endogenous promoter of the host gene PPP1R12C might not drive sufficient expression of markertrons to reconstitute enough antibiotic resistance protein to counteract actions of the antibiotics. We thus tested an alternative strategy to express Intres markertrons by TetO promoter whose activity can be titrated by doxycycline (dox) concentration. To allow comparison of Intres-mediated biallelic selection versus full-length (FL) non-split selectable markers, we implemented several different targeting construct designs. First, we drive expression of a full-length (FL) resistance gene (e.g., Hygro) together with rtTA under a constitutive EF1a promoter and a separate test Intres (e.g., Blast Intres) under a dox-inducible TetO promoter (FIG. 12B, Plasmids 109 and 110). This allow comparison of full length and split selectable markers within the same constructs. To allow fair comparison of full length versus split markers driven by the same TetO promoter, we constructed two similar plasmids 107 and 108 (cf. Plasmids 109 and 110), wherein full-length antibiotic resistance gene (Blast) is placed downstream of the TetO promoter (FIG. 12A). To enable single-cell quantification of biallelic targeting and to demonstrate the feasibility of incorporating two transgenes into two AAVS1 alleles, we appended EGFP and mScarlet fluorescent genes downstream of the test split or non-split markers via self-cleaving 2A peptide. Similarly, to test Hygro Intres, we swapped the EF1a and TetO-driven markers so that FL Hygro or Hygro Intres were placed downstream of TetO and FL Blast downstream of EF1a (FIGS. 12C-12D; Plasmids 111-114). We co-transfected pX330-AAVS1 (Plasmid 106) containing Cas9 and sgRNA targeting AAVS1, and the different pairs of targeting constructs to HEK293T cells, split into triplicate doxycycline-containing media without antibiotics, with blasticidin, or with hygromycin at the subsequent passages. Two weeks after selection, we analyzed the cultures for biallelic targeting by flow cytometric measurement of GFP and RFP fluorescence (FIG. 12E). As expected, non-selected cultures harbored small fraction (<1%) of biallelic knock-in GFP+/RFP+ cells (FIG. 12E; Selection=None). Selection of antibiotics where corresponding FL antibiotic resistance genes were present on targeting constructs yielded <30% biallelic knock-in cells (FIG. 12E; Blast: TC a,c,d; Hygro: TC a,b,c). In contrast, selection of antibiotics where corresponding Intres are present on the targeting constructs yielded 75% (FIG. 6e; Blast Intres: TC b) and 88% (FIG. 6e; Hygro Intres: TC d) biallelic knock-in cells.

[0225] In the Examples above, we have engineered split antibiotic resistance and fluorescent protein genes that can allow selection for two or more “unlinked” transgenes. By inserting unnatural residues at selectable markers, we showed that novel high-efficiency split points can be utilized, expanding the positions available for engineering. We demonstrated that split selectable markers can be incorporated into lentiviral vectors or gene targeting constructs in CRISPR/Cas9 genome editing experiments to enable enrichment of cells with double transgenesis or biallelic knock-ins. By combining two or more splits points, we showed that 3- and 4-split markers can be generated to allow higher degree transgenic selection. Future development of even higher-degree split selectable markers may enable “hyper-engineering” of cells containing tens of transgenes or targeted knock-ins.

### Materials and Methods

[0226] Cloning

[0227] To generate a test plasmid for each markertron, we first generated a Gateway donor plasmid containing its ORF and then recombine into lentiviral destination vector with TagBFP2 (Plasmid 94: pLX-DEST-IRES-TagBFP2), EGFP (Plasmid 95: pLX-DEST-IRES-EGFP), or mCherry (Plasmid 96: pLX-DEST-IRES-mCherry) reporters, which were derived from pLX302 (addgene.org/25896/) by removing Puromycin resistance gene and inserting IRES-fluorescent genes downstream of the Gateway cassette. The markertron-ORF Gateway donor plasmids were generated either by a nested fusion PCR procedure to combine intein with the coding sequence of fragments of the selectable marker followed by insertion into the pCR8-GW-TOPO plasmid by sequence- and ligation-independent cloning (SLIC) (Li, M. Z. & Elledge, S. J. SLIC: a method for sequence- and ligation-independent cloning. Gene Synthesis: Methods and Protocols, 51-59 (2012)), or PCR-amplifying the relevant fragment of the selectable marker followed by insertion into “scaffold” plasmids (Plasmids 27-32) containing the intein sequences by SLIC. DNA sequences encoding inteins were codon optimized for Homo sapiens, and synthesized as GBlock (IDT), with AC1947 GB encoding NpuDnaE intein, AC1949 GB encoding SspDnaB intein. Selectable marker fragments were amplified from plasmids containing these markers. See Table 1 for plasmids.

[0228] Cell Culture

[0229] All cells were cultivated in Dulbecco's modified Eagle's medium (DMEM) (Sigma) with 10% fetal bovine serum (FBS)(Lonza), 4% Glutamax (Gibco), 1% Sodium Pyruvate (Gibco) and penicillin-streptomycin (Gibco). Incubator conditions were 37° C. and 5% CO₂.

[0230] Virus Production

[0231] A viral packaging mix of pLP1, pLP2, and VSV-G were co-transfected with each lentiviral vector into Lenti-X 293T cells (ClonTech), seeded the day before in 6-well plates at a concentration of 1.2×10⁶ cells per well, using Lipofectamine 3000. Media was changed 6 h after transfection then incubated overnight. 28 hour post transfection, the media supernatant containing virus was filtered using 45 uM PES filters then stored at −80° C. until use.

[0232] Transduction

[0233] The day prior to transduction, target cells (HEK293T, MCF7, U2-OS) were seeded into 12-well plates at a density of 1.5×10⁵ cells per well. Prior to transduction, media was changed to media containing 10 μg/mL polybrene, 1 mL per well. 250 μL of each respective virus (500 μL total for experimental samples with two viruses added) was added to each well and incubated overnight. Media was changed 24 hour post infection. 4 day post infection cells were split into duplicate plates. 5 day post infection media with antibiotic (hygromycin) was added to each respective well of one replicate plate (the other remained under no selection). Antibiotic selection continued for 2 weeks before analysis on FACS.

[0234] Fluorescent-Activated Cell Sorting

[0235] Cells were trypisinized, suspended in media then analyzed on a LSRFortessa X-20 (BD Bioscience) flow cytometer using FACSDiVa software, version 8, on an HP Z230 workstation. Fifty thousand events were collected each run.

CONSTRUCTS AND SEQUENCES

NpuDnaE(N)
CLSYETEILTVEYGLLPIGKIVEKRIECTVYSVDNNGNIYTQPVAQWHDRGEQEVFEYCLEDGSLIRATKDHKF
MTVDGQMLPIDEIFERELDLMRVDNLPN (SEQ ID NO: 7)
NpuDnaE(C)
IKIATRKYLGKQNVYDIGVERDHNFALKNGFIASN (SEQ ID NO: 8)
SspDnaB(N-S0)
CISGDSLISLASTGKRVSIKDLLDEKDFEIWAINEQTMKLESAKVSRVFCTGKKLVYILKTRLGRTIKATANHRF
LTIDGWKRLDELSLKEHIALPRKLESSSLQL (SEQ ID NO: 9)
SspDnaB(C-S0)
SPEIEKLSQSDIYWDSIVSITETGVEEVFDLTVPGPHNFVANDIIVHN (SEQ ID NO: 10)
NpuDnaE(N)-LZA
CLSYETEILTVEYGLLPIGKIVEKRIECTVYSVDNNGNIYTQPVAQWHDRGEQEVFEYCLEDGSLIRATKDHKF
MTVDGQMLPIDEIFERELDLMRVDNLPNGGGGSGSAQLEKELQALEKKLAQLEWENQALEKELAQ (SEQ ID
NO: 11)
LZB-NpuDnaGEP(C)
AQLKKKLQANKKELAQLKWKLQALKKKLAQGGGGSGSMIKIATRKYLGKQNVYDIGVGEPHNFALKNGFIA
SN (SEQ ID NO: 12)
NpuDnaGFP(C)
IKIATRKYLGKQNVYDIGVGEPHNFALKNGFIASN (SEQ ID NO: 13)
LZA
AQLEKELQALEKKLAQLEWENQALEKELAQ (SEQ ID NO: 14)
LZB
AQLKKKLQANKKELAQLKWKLQALKKKLAQ (SEQ ID NO: 15)
SspDnaE(N)
CLSFGTEILTVEYGPLPIGKIVSEEINCSVYSVDPEGRVYTQAIAQWHDRGEQEVLEYELEDGSVIRATSDHRFL
TTDYQLLAIEEIFARQLDLLTLENIKQTEEALDNHRLPFPLLDAGTIK (SEQ ID NO: 16)
SspDnaE(C)
VKVIGRRSLGVQRIFDIGLPQDHNFLLANGAIAAN (SEQ ID NO: 17)
SspDnaB(N)
CISGDSLISLA (SEQ ID NO: 18)
SspDnaB(C)
STGKRVSIKDLLDEKDFEIWAINEQTMKLESAKVSRVFCTGKKLVYILKTRLGRTIKATANHRFLTIDGWKRLD
ELSLKEHIALPRKLESSSLQLSPEIEKLSQSDIYWDSIVSITETGVEEVFDLTVPGPHNFVANDIIVHN (SEQ ID
NO: 19)
Plasmid 3: pLX-Hygro(1-89)-NpuDnaE(N)-IRES-TagBFP2
Protein = Hygro(1-89)-NpuDnaE(N)
Vector sequence (SEQ ID NO: 20)
Amino acid sequence (SEQ ID NO: 21)
Plasmid 4: pLX-NpuDnaE(C)-Hygro(90-341)-IRES-mCherry
Protein = NpuDnaE(C)-Hygro(90-341)
Vector sequence (SEQ ID NO: 22)
Amino acid sequence (SEQ ID NO: 23)
Plasmid 5: pLX-Hygro(1-200)-SspDnaB(N)-IRES-TagBFP2
Protein = Hygro(1-200)-SspDnaB(N)
Vector sequence (SEQ ID NO: 24)
Amino acid sequence (SEQ ID NO: 25)
Plasmid 6: pLX-SspDnaB(C)-Hygro(201-341)-IRES-mCherry
Protein = SspDnaB(C)-Hygro(201-341)
Vector sequence (SEQ ID NO: 26)
Amino acid sequence (SEQ ID NO: 27)
Plasmid 7: pLX-Hygro(1-52)-NpuDnaE(N)-IRES-TagBFP2
Protein = Hygro(1-52)-NpuDnaE(N)
Vector sequence (SEQ ID NO: 28)
Amino acid sequence (SEQ ID NO: 29)
Plasmid 8: pLX-NpuDnaE(C)-Hygro(53-341)-IRES-mCheny
Protein = NpuDnaE(C)-Hygro(53-341)
Vector sequence (SEQ ID NO: 30)
Amino acid sequence (SEQ ID NO: 31)
Plasmid 9: pLX-Hygro(1-240)-NpuDnaE(N)-IRES-TagBFP2
Protein = Hygro(1-240)-NpuDnaE(N)
Vector sequence (SEQ ID NO: 32)
Amino acid sequence (SEQ ID NO: 33)
Plasmid 10: pLX-NpuDnaE(C)-Hygro(241-341)-IRES-mCheny
Protein = NpuDnaE(C)-Hygro (241 -341)
Vector sequence (SEQ ID NO: 34)
Amino acid sequence (SEQ ID NO: 35)
Plasmid 11: pLX-Hygro(1-292)-NpuDnaE(N)-IRES-TagBFP2
Protein = Hygro(1-292)-NpuDnaE(N)
Vector sequence (SEQ ID NO: 36)
Amino acid sequence (SEQ ID NO: 37)
Plasmid 12: pLX-NpuDnaE(C)-Hygro(293-341)-IRES-mCheny
Protein = NpuDnaE(C)-Hygro(293-341)
Vector sequence (SEQ ID NO: 38)
Amino acid sequence (SEQ ID NO: 39)
Plasmid 13: pLX-Blast(1-102)-NpuDnaE(N)-IRES-TagBFP2
Protein = Blast(1-102)-NpuDnaE(N)
Vector sequence (SEQ ID NO: 40)
Amino acid sequence (SEQ ID NO: 41)
Plasmid 14: pLX-NpuDnaE(C)-Blast(103-140)-IRES-mCheny
Protein = NpuDnaE(C)-Blast(103-140)
Vector sequence (SEQ ID NO: 42)
Amino acid sequence (SEQ ID NO: 43)
Plasmid 17: pLX-Puro(1-119)-NpuDnaE(N)-IRES-TagBFP2
Protein = Puro(1-119)-NpuDnaE(N)
Vector sequence (SEQ ID NO: 44)
Amino acid sequence (SEQ ID NO: 45)
Plasmid 18: pLX-NpuDnaE(C)-Puro(insCys; 120-199)-IRES-mCheny
Protein = NpuDnaE(C)-Puro(insCys; 120-199)
Vector sequence (SEQ ID NO: 46)
Amino acid sequence (SEQ ID NO: 47)
Plasmid 19: pLX-Puro(1-100)-SspDnaB(N-S0)-IRES-TagBFP2
Protein = Puro(1-100)-SspDnaB(N-S0)
Vector sequence (SEQ ID NO: 48)
Amino acid sequence (SEQ ID NO: 49)
Plasmid 20: pLX-SspDnaB(C-S0)-Puro(101-199)-IRES-mCherry
Protein = SspDnaB(C-S0)-Puro(101-199)
Vector sequence (SEQ ID NO: 50)
Amino acid sequence (SEQ ID NO: 51)
Plasmid 21: pLX-Neo(1-133)-NpuDnaE(N)-IRES-TagBFP2
Protein = Neo(1-133)-NpuDnaE(N)
Vector sequence (SEQ ID NO: 52)
Amino acid sequence (SEQ ID NO: 53)
Plasmid 22: pLX-NpuDnaE(C)-Neo(134-267)-IRES-mCherry
Protein = NpuDnaE(C)-Neo(134-267)
Vector sequence (SEQ ID NO: 54)
Amino acid sequence (SEQ ID NO: 55)
Plasmid 23: pLX-Neo(1-194)-NpuDnaE(N)-IRES-TagBFP2
Protein = Neo(1-194)-NpuDnaE(N)
Vector sequence (SEQ ID NO: 56)
Amino acid sequence (SEQ ID NO: 57)
Plasmid 24: pLX-NpuDnaE(C)-Neo(195-267)-IRES-mCherry
Protein = NpuDnaE(C)-Neo(195-267)
Vector sequence (SEQ ID NO: 58)
Amino acid sequence (SEQ ID NO: 59)
Plasmid 25: pLX-NpuDnaE(C)_Hygro(53-89)-NpuDnaE(N)-IRES-GFP
Protein = NpuDnaE(C)_Hygro(53-89)-NpuDnaE(N)
Vector sequence (SEQ ID NO: 60)
Amino acid sequence (SEQ ID NO: 61)
Plasmid 26: pLX-NpuDnaE(C)_Hygro(53-239)-NpuDnaE(N)-IRES-GFP
Protein = NpuDnaE(C)_Hygro(53-239)-NpuDnaE(N)
Vector sequence (SEQ ID NO: 62)
Amino acid sequence (SEQ ID NO: 63)
Plasmid 27: pCR8-BsaI→ccdbCam←BsaI-NpuDnaE(N)-MD1-68-15 (SEQ ID NO: 64)
Plasmid 28: pCR8-NpuDnaE(C)_BsaI→ccdbCam←BsaI-MD1-68-18 (SEQ ID NO: 65)
Plasmid 29: pCR8-BsaI→ccdbCam←BsaI-SspDnaE(N)-MD1-68-12 (SEQ ID NO: 66)
Plasmid 30: pCR8-SspDnaE(C)_BsaI→ccdbCam←BsaI-MD1-68-13 (SEQ ID NO: 67)
Plasmid 31: pCR8-BsaI→ccdbCam←BsaI-SspDnaB(N-S0)-25-135-18 (SEQ ID NO: 68)
Plasmid 32: pCR8-SspDnaB(C-S0)_BsaI→ccdbCam←BsaI-25-155-41 (SEQ ID NO: 69)
Plasmid 33: pLX-mScarlet(1-46)-NpuDnaE(N)_LZA-IRES-TagBFP2
Protein = mScarlet(1-46)-NpuDnaE(N)_LZA
Vector sequence (SEQ ID NO: 70)
Amino acid sequence (SEQ ID NO: 71)
Plasmid 34: pLX-LZB_NpuDnaE(C)-mScarlet(insCys; 47-232)-IRES-TagBFP2
Protein = LZB_NpuDnaE(C)-mScarlet(insCys; 47-232)
Vector sequence (SEQ ID NO: 72)
Amino acid sequence (SEQ ID NO: 73)
Plasmid 35: pLX-mScarlet(1-48)-NpuDnaE(N)_LZA-IRES-TagBFP2
Protein = mScarlet(1-48)-NpuDnaE(N)_LZA
Vector sequence (SEQ ID NO: 74)
Amino acid sequence (SEQ ID NO: 75)
Plasmid 36: pLX-LZB_NpuDnaE(C)-mScarlet(insCys; 49-232)-IRES-GFP
Protein = LZB_NpuDnaE(C)-mScarlet(insCys; 49-232)
Vector sequence (SEQ ID NO: 76)
Amino acid sequence (SEQ ID NO: 77)
Plasmid 37: pLX-mScarlet(1-51)-NpuDnaE(N)_LZA -IRES-TagBFP2
Protein = mScarlet(1-51)-NpuDnaE(N)_LZA
Vector sequence (SEQ ID NO: 78)
Amino acid sequence (SEQ ID NO: 79)
Plasmid 38: pLX-LZB_NpuDnaE(C)-mScarlet(insCys; 52-232)-IRES-GFP
Protein = LZB_NpuDnaE(C)-mScarlet(insCys; 52-232)
Vector sequence (SEQ ID NO: 80)
Amino acid sequence (SEQ ID NO: 81)
Plasmid 39: pLX-mScarlet(1-75)-NpuDnaE(N)_LZA-IRES-TagBFP2
Protein = mScarlet(1-75)-NpuDnaE(N)_LZA
Vector sequence (SEQ ID NO: 82)
Amino acid sequence (SEQ ID NO: 83)
Plasmid 40: pLX-LZB_NpuDnaE(C)-mScarlet(insCys; 76-232)-IRES-GFP
Protein = LZB_NpuDnaE(C)-mScarlet(insCys; 76-232)
Vector sequence (SEQ ID NO: 84)
Amino acid sequence (SEQ ID NO: 85)
Plasmid 41: pLX-mScarlet(1-122)-NpuDnaE(N)_LZA-IRES-TagBFP2
Protein = mScarlet(1-122)-NpuDnaE(N)_LZA
Vector sequence (SEQ ID NO: 86)
Amino acid sequence (SEQ ID NO: 87)
Plasmid 42: pLX-LZB_NpuDnaE(C)-mScarlet(insCys; 123-232)-IRES-GFP
Protein = LZB_NpuDnaE(C)-mScarlet(insCys; 123-232)
Vector sequence (SEQ ID NO: 88)
Amino acid sequence (SEQ ID NO: 89)
Plasmid 43: pLX-mScarlet(1-140)-NpuDnaE(N)_LZA-IRES-TagBFP2
Protein = mScarlet(1-140)-NpuDnaE(N)_LZA
Vector sequence (SEQ ID NO: 90)
Amino acid sequence (SEQ ID NO: 91)
Plasmid 44: pLX-LZB_NpuDnaE(C)-mScarlet(insCys; 141-232)-IRES-GFP
Protein = LZB_NpuDnaE(C)-mScarlet(insCys; 141-232)
Vector sequence (SEQ ID NO: 92)
Amino acid sequence (SEQ ID NO: 93)
Plasmid 45: pLX-mScarlet(1-163)-NpuDnaE(N)_LZA-IRES-TagBFP2
Protein = mScarlet(1-163)-NpuDnaE(N)_LZA
Vector sequence (SEQ ID NO: 94)
Amino acid sequence (SEQ ID NO: 95)
Plasmid 46: pLX-LZB_NpuDnaE(C)-mScarlet(insCys; 164-232)-IRES-GFP
Protein = LZB_NpuDnaE(C)-mScarlet(insCys; 164-232)
Vector sequence (SEQ ID NO: 96)
Amino acid sequence (SEQ ID NO: 97)
Plasmid 47: pCR8-TagBFP2
Protein = TagBFP2
Vector sequence (SEQ ID NO: 98)
Amino acid sequence (SEQ ID NO: 99)
Plasmid 48: pCR8-mCherry
Protein = mCherry
Vector sequence (SEQ ID NO: 100)
Amino acid sequence (SEQ ID NO: 101)
Plasmid 49: pLX-DEST-IRES-Hygro(1-89)-NpuDnaE(N)
Protein = Hygro(1-89)-NpuDnaE(N)
Vector sequence (SEQ ID NO: 102)
Amino acid sequence (SEQ ID NO: 103)
Plasmid 50: pLX-DEST-IRES-NpuDnaE(C)-Hygro(90-341)
Protein = NpuDnaE(C)-Hygro(90-341)
Vector sequence (SEQ ID NO: 104)
Amino acid sequence (SEQ ID NO: 105)
Plasmid 51: pLX-[TagBFP2]-IRES-Hygro(1-89)-NpuDnaE(N)
Vector sequence (SEQ ID NO: 106)
Plasmid 52: pLX-[mCherry]-IRES-NpuDnaE(C)-Hygro(90-341)
Vector sequence (SEQ ID NO: 107)
Plasmid 53: pLX-DEST-IRES-Puro(1-119)-NpuDnaE(N)
Protein = Puro(1-119)-NpuDnaE(N)
Vector sequence (SEQ ID NO: 108)
Amino acid sequence (SEQ ID NO: 109)
Plasmid 54: pLX-DEST-IRES-NpuDnaE(C)-Puro(120-199)
Protein = NpuDnaE(C)-Puro(120-199)
Vector sequence (SEQ ID NO: 110)
Amino acid sequence (SEQ ID NO: 111)
Plasmid 55: pLX-[TagBFP2]-IRES-Puro(1-119)-NpuDnaE(N)
Vector sequence (SEQ ID NO: 112)
Plasmid 56: pLX-[mCherry]-IRES-NpuDnaE(C)-Puro(120-199)
Vector sequence (SEQ ID NO: 113)
Plasmid 57: pLX-DEST-IRES-Neo(1-194)-NpuDnaE(N)
Protein = Neo(1-194)-NpuDnaE(N)
Vector sequence (SEQ ID NO: 114)
Amino acid sequence (SEQ ID NO: 115)
Plasmid 58: pLX-DEST-IRES-NpuDnaE(C)-Neo(195-267)
Protein = NpuDnaE(C)-Neo(195-267)
Vector sequence (SEQ ID NO: 116 )
Amino acid sequence (SEQ ID NO: 117)
Plasmid 59: pLX-[TagBFP2]-IRES-Neo(1-194)-NpuDnaE(N)
Vector sequence (SEQ ID NO: 118)
Plasmid 60: pLX-[mCherry]-IRES-NpuDnaE(C)-Neo(195-267)
Vector sequence (SEQ ID NO: 119)
Plasmid 61: pLX-mScarlet(1-51)-NpuDnaE(N)-LZA-IRES-TagBFP2
Protein = mScarlet(1-51)-NpuDnaE(N)-LZA
Vector sequence (SEQ ID NO: 120)
Amino acid sequence (SEQ ID NO: 121)
Plasmid 62: pLX-LZB-NpuDnaE(C)-mScarlet(\hat{ }C,52-163)-NpuDnaE(N)_LZA-IRES-EGFP
Protein = LZB-NpuDnaE(C)-mScarlet(C; 52-163)-NpuDnaE(N)_LZA
Vector sequence (SEQ ID NO: 122)
Amino acid sequence (SEQ ID NO: 123)
Plasmid 63: pLX-LZB-NpuDnaE(C)-mScarlet(\hat{ }C; 164-232)-IRES-EGFP
Protein = LZB-NpuDnaE(C)-mScarlet(\hat{ }C; 164-232)
Vector sequence (SEQ ID NO: 124)
Amino acid sequence (SEQ ID NO: 125)
Plasmid 64: pLX-Hygro(1 -69)-NpuDnaE(N)-IRES-TagBFP2
Protein = Hygro(1-69)-NpuDnaE(N)
Vector sequence (SEQ ID NO: 126)
Amino acid sequence (SEQ ID NO: 127)
Plasmid 65: pLX-NpuDnaE(C)-Hygro(\hat{ }C; 70-341)-IRES-mCherry
Protein = NpuDnaE(C)-Hygro(\hat{ }C; 70-341)
Vector sequence (SEQ ID NO: 128)
Amino acid sequence (SEQ ID NO: 129)
Plasmid 66: pLX-Hygro(1-131)-NpuDnaE(N)-IRES-TagBFP2
Protein = Hygro(1-131)-NpuDnaE(N)
Vector sequence (SEQ ID NO: 130)
Amino acid sequence (SEQ ID NO: 131)
Plasmid 67: pLX-NpuDnaE(C)-Hygro(\hat{ }C; 132-341)-IRES-mCherry
Protein = NpuDnaE(C)-Hygro(\hat{ }C; 132-341)
Vector sequence (SEQ ID NO: 132)
Amino acid sequence (SEQ ID NO: 133)
Plasmid 68: pLX-Hygro(1-171)-NpuDnaE(N)-IRES-TagBFP2
Protein = Hygro(1-171)-NpuDnaE(N)
Vector sequence (SEQ ID NO: 134)
Amino acid sequence (SEQ ID NO: 135)
Plasmid 69: pLX-NpuDnaE(C)-Hygro(\hat{ }C; 172-341)-IRES-mCherry
Protein = NpuDnaE(C)-Hygro(\hat{ }C; 172-341)
Vector sequence (SEQ ID NO: 136)
Amino acid sequence (SEQ ID NO: 137)
Plasmid 70: pLX-Hygro(1-218)-NpuDnaE(N)-IRES-TagBFP2
Protein = Hygro(1-218)-NpuDnaE(N)
Vector sequence (SEQ ID NO: 138)
Amino acid sequence (SEQ ID NO: 139)
Plasmid 71: pLX-NpuDnaE(C)-Hygro(\hat{ }C; 219-341)-IRES-mCherry
Protein = NpuDnaE(C)-Hygro(\hat{ }C; 219-341)
Vector sequence (SEQ ID NO: 140)
Amino acid sequence (SEQ ID NO: 141)
Plasmid 72: pLX-Hygro(1-259)-NpuDnaE(N)-IRES-TagBFP2
Protein = Hygro(1-259)-NpuDnaE(N)
Vector sequence (SEQ ID NO: 142)
Amino acid sequence (SEQ ID NO: 143)
Plasmid 73: pLX-NpuDnaE(C)-Hygro(\hat{ }C; 260-341)-IRES-mCherry
Protein = NpuDnaE(C)-Hygro(\hat{ }C; 260-341)
Vector sequence (SEQ ID NO: 144)
Amino acid sequence (SEQ ID NO: 145)
Plasmid 74: pLX-Hygro(1-277)-NpuDnaE(N)-IRES-TagBFP2
Protein = Hygro(1-277)-NpuDnaE(N)
Vector sequence (SEQ ID NO: 146)
Amino acid sequence (SEQ ID NO: 147)
Plasmid 75: pLX-NpuDnaE(C)-Hygro(\hat{ }C; 278-341)-IRES-mCherry
Protein = NpuDnaE(C)-Hygro(\hat{ }C; 278-341)
Vector sequence (SEQ ID NO: 148)
Amino acid sequence (SEQ ID NO: 149)
Plasmid 76: pLX-Puro(1-32)-NpuDnaE(N)-IRES-TagBFP2
Protein = Puro(1-32)-NpuDnaE(N)
Vector sequence (SEQ ID NO: 150)
Amino acid sequence (SEQ ID NO: 151)
Plasmid 77: pLX-NpuDnaE(C)-Puro(\hat{ }C; 33-199)-IRES-mCherry
Protein = NpuDnaE(C)-Puro(\hat{ }C; 33-199)
Vector sequence (SEQ ID NO: 152)
Amino acid sequence (SEQ ID NO: 153)
Plasmid 78: pLX-Puro(1-84)-NpuDnaE(N)-IRES-TagBFP2
Protein = Puro(1-84)-NpuDnaE(N)
Vector sequence (SEQ ID NO: 154)
Amino acid sequence (SEQ ID NO: 155)
Plasmid 79: pLX-NpuDnaE(C)-Puro(\hat{ }C; 85-199)-IRES-mCherry
Protein = NpuDnaE(C)-Puro(\hat{ }C; 85-199)
Vector sequence (SEQ ID NO: 156)
Amino acid sequence (SEQ ID NO: 157)
Plasmid 80: pLX-Puro(1-137)-NpuDnaE(N)-IRES-TagBFP2
Protein = Puro(1-137)-NpuDnaE(N)
File = pLX-[PuroKC3(N)-NpuDnaE(N)-25-131-29″]-IRES-TagBFP2-25-133-6
Vector sequence (SEQ ID NO: 158)
Amino acid sequence (SEQ ID NO: 159)
Plasmid 81: pLX-NpuDnaE(C)-Puro(\hat{ }C; 138-199)-IRES-mCherry
Protein = NpuDnaE(C)-Puro(\hat{ }C; 138-199)
Vector Sequence (SEQ ID NO: 160)
Amino acid sequence (SEQ ID NO: 161)
Plasmid 82: pLX-Puro(1-158)-NpuDnaE(N)-IRES-TagBFP2
Protein = Puro(1-158)-NpuDnaE(N)
Vector Sequence (SEQ ID NO: 162)
Amino acid sequence (SEQ ID NO: 163)
Plasmid 83: pLX-NpuDnaE(C)-Puro(\hat{ }C; 159-199)-IRES-mCherry
Protein = NpuDnaE(C)-Puro(\hat{ }C; 159-199)
Vector Sequence (SEQ ID NO: 164)
Amino acid sequence (SEQ ID NO: 165)
Plasmid 84: pLX-Puro(1-180)-NpuDnaE(N)-IRES-TagBFP2
Protein = Puro(1-180)-NpuDnaE(N)
Vector Sequence (SEQ ID NO: 166)
Amino acid sequence (SEQ ID NO: 167)
Plasmid 85: pLX-NpuDnaE(C)-Puro(\hat{ }C; 181-199)-IRES-mCherry
Protein = NpuDnaE(C)-Puro(\hat{ }C; 181-199)
Vector Sequence (SEQ ID NO: 168)
Amino acid sequence (SEQ ID NO: 169)
Plasmid 86: pLX-Blast(1-58)-NpuDnaE(N)-IRES-TagBFP2
Protein = Blast(1-58)-NpuDnaE(N)
Vector Sequence (SEQ ID NO: 170)
Amino acid sequence (SEQ ID NO: 171)
Plasmid 87: pLX-NpuDnaE(C)-Blast(59-140)-IRES-mCherry
Protein = NpuDnaE(C)-Blast(59-140)
Vector Sequence (SEQ ID NO: 172)
Amino acid sequence (SEQ ID NO: 173)
Plasmid 88: pLX-NpuDnaE((C)-HygroBA-SspDnaB(N-S0)-IRES-EGFP
Protein = NpuDnaE(C)-Hygro(53-200)-SsrsDnaB(N-S0)
Vector Sequence (SEQ ID NO: 174)
Amino acid sequence (SEQ ID NO: 175)
Plasmid 89: pLX-SspDnaB(C-S0)-Hygro(201-341)-IRES-mCherry
Protein = SspDnaB(C-S0)-Hygro(201-341)
Vector Sequence (SEQ ID NO: 176)
Amino acid sequence (SEQ ID NO: 177)
Plasmid 90: pLX-NpuDnaE(C)-Hygro(90-200)-SspDnaB(N-S0)-IRES-EGFP
Protein = NpuDnaE(C)-Hygro(90-200)-SspDnaB(N-S0)
Vector Sequence (SEQ ID NO: 178)
Amino acid sequence (SEQ ID NO: 179)
Plasmid 91: pLX-Hygro(1-200)-SspDnaB(N-S0)-IRES-TagBFP2
Protein = Hygro(1-200)-SspDnaB(N-S0)
Vector sequence (SEQ ID NO: 180)
Amino acid sequence (SEQ ID NO: 181)
Plasmid 92: pLX-SspDnaB(C-S0)-Hygro(201-240)-NpuDnaE(N)-IRES-EGFP
Protein = SspDnaB(C-S0)-Hygro(201-240)-NpuDnaE(N)
Vector sequence (SEQ ID NO: 182)
Amino acid sequence (SEQ ID NO: 183)
Plasmid 93: pLX-SspDnaB(C-S0)-Hygro(201-292)-NpuDnaE(N)-IRES-EGFP
Protein = SspDnaB(C-S0)-Hygro(201-292)-NpuDnaE(N)
Vector sequence (SEQ ID NO: 184)
Amino acid sequence (SEQ ID NO: 185)
Plasmid 94: pLX-DEST-IRES-TagBFP2 (SEQ ID NO: 186)
Plasmid 95: pLX-DEST-IRES-EGFP (SEQ ID NO: 187)
Plasmid 96: pLX-DEST-IRES-mCherry (SEQ ID NO: 188)
Plasmid 97: pLX-Hygro-IRES-TagBFP2
Vector sequence (SEQ ID NO: 189)
Plasmid 98: pLX-Hygro-IRES-mCherry
Vector sequence (SEQ ID NO: 190)
Plasmid 99: pLX-Puro-IRES-TagBFP2
Vector sequence (SEQ ID NO: 191)
Plasmid 100: pLX-Puro-IRES-mCherry
Vector sequence (SEQ ID NO: 192)
Plasmid 101: pLX-Hygro-IRES-EGFP
Vector sequence (SEQ ID NO: 193)
Plasmid 102: pLX-NLS_GFP-IRES-Hygro
Vector sequence (SEQ ID NO: 194)
Plasmid 103: pLX-LifeAct_mCherry-IRES-Hygro
Vector sequence (SEQ ID NO: 195)
Plasmid 104: pLX-NLS_GFP-IRES-Hygro(1-89)-NpuDnaE(N)
Vector sequence (SEQ ID NO: 196)
Plasmid 105: pLX-LifeAct_mScarlet-IRES-NpuDnaE(C)-Hygro(90-341)
Vector sequence (SEQ ID NO: 197)
Plasmid 106: pX330-AAVS1
sgRNA spacer sequence: gACCCCACAGTGGGGCCACTA (First g does not match genome)(SEQ ID NO: 198)
Vector sequence (SEQ ID NO: 199)
Plasmid 107: pAAVS1-Nst-EF1aHygro2ArtTA3(-)_TetO-Blast-P2A-EGFP
Vector sequence (SEQ ID NO: 200)
Plasmid 108: pAAVS1-Nst-EF1aHygro2ArtTA3(-)_TetO-Blast-P2A-mScarlet
Vector sequence (SEQ ID NO: 201)
Plasmid 109: pAAVS1-Nst-EF1aHygro2ArtTA3(-)_TetO-Blast(1-102)_NpuDnaE(N)-P2A-EGFP
Vector sequence (SEQ ID NO: 202)
Plasmid 110: pAAVS1-Nst-EF1aHygro2ArtTA3(-)_TetO-NpuDnaE(C)_Blast(103-140)-P2A-mScarlet
Vector sequence (SEQ ID NO: 203)
Plasmid 111: pAAVS1-Nst-EF1aBlast2ArtTA3(-)_TetO-Hygro-P2A-NTR-E2A-EGFP
Vector sequence (SEQ ID NO: 204)
Plasmid 112: pAAVS1-Nst-EF1aBlast2ArtTA3(-)_TetO-Hygro-P2A-NTR-E2A-mCherry
Vector sequence (SEQ ID NO: 205)
Plasmid 113: pAAVS1-Nst-EF1aBlast2ArtTA3(-)_TetO-Hygro(1-89)-NpuDnaE(N)-P2A-NTR-E2A-EGFP
Vector sequence (SEQ ID NO: 206)
Plasmid 114: pAAVS1-Nst-EF1aBlast2ArtTA3(-)_TetO-NpuDnaE(C)-Hygro(90-341)-P2A-NTR-E2A-mCherry
Vector sequence (SEQ ID NO: 207)
Plasmid 115: pLX-Hygro(1-89)_NpuDnaE(N)_LZA-IRES-TagBFP2
Protein = Hygro(1-89)-NpuDnaE(N)-LZA
Vector sequence (SEQ ID NO: 208)
Amino acid sequence (SEQ ID NO: 209)
Plasmid 116: pLX-LZB_NpuDnaGEP(C)_Hygro(90-200)_SspDnaB(N-S0)-IRES-GFP
Protein = LZB-NpuDnaGEP(C)-Hygro(90-200)-SspDnaB(N-S0)
Vector sequence (SEQ ID NO: 210)
Amino acid sequence (SEQ ID NO: 211)
Plasmid 117: pLX-SspDnaB(C-S0)_Hygro(201-240)_NpuDnaE(N)_LZA-IRES-GFP
Protein = SspDnaB(C-S0)-Hygro(201-240)-NpuDnaE(N)-LZA
Vector sequence (SEQ ID NO: 212)
Amino acid sequence (SEQ ID NO: 213)
Plasmid 118: pLX-LZB_NpuDnaGEP(C)_Hygro(241-341)-IRES-mCherry
Protein = LZB-NpuDnaGEP(C)-Hygro(241-341)
Vector sequence (SEQ ID NO: 214)
Amino acid sequence (SEQ ID NO: 215)
AC1947GB (SEQ ID NO: 216)
AC1949GB (SEQ ID NO: 217)
pCR8-ccdbCam (SEQ ID NO: 218)

### REFERENCES

[0236] 1. Shearer, R. F. & Saunders, D. N. Experimental design for stable genetic manipulation in mammalian cell lines: lentivirus and alternatives. Genes to cells: devoted to molecular & cellular mechanisms 20, 1-10 (2015).
[0237] 2. Abuin, A. & Bradley, A. Recycling selectable markers in mouse embryonic stem cells. Molecular and cellular biology 16, 1851-1856 (1996).
[0238] 3. Shah, N. H. & Muir, T. W. Inteins: Nature's Gift to Protein Chemists. Chemical science 5, 446-461 (2014).
[0239] 4. Zettler, J., Schutz, V. & Mootz, H. D. The naturally split Npu DnaE intein exhibits an extraordinarily high rate in the protein trans-splicing reaction. FEBS letters 583, 909-914 (2009).
[0240] 5. Iwai, H., Züger, S., Jin, J. & Tam, P.-H. Highly efficient protein trans-splicing by a naturally split DnaE intein from Nostoc punctiforme. FEBS letters 580, 1853-1858 (2006).
[0241] 6. Sun, W., Yang, J. & Liu, X. Q. Synthetic two-piece and three-piece split inteins for protein trans-splicing. The Journal of biological chemistry 279, 35281-35286 (2004).
[0242] 7. Cheriyan, M., Pedamallu, C. S., Tori, K. & Perler, F. Faster protein splicing with the Nostoc punctiforme DnaE intein using non-native extein residues. The Journal of biological chemistry 288, 6202-6211 (2013).
[0243] 8. Chee, J. & Chin, C. Gateway cloning technology: Advantages and drawbacks. Cloning Transgenes 4, 138 (2015).
[0244] 9. Bindels, D. S. et al. mScarlet: a bright monomeric red fluorescent protein for cellular imaging. nature methods 14, 53 (2017).
[0245] 10. Stevens, A. J. et al. A promiscuous split intein with expanded protein engineering applications. Proceedings of the National Academy of Sciences 114, 8538-8543 (2017).
[0246] 11. Ghosh, I., Hamilton, A. D. & Regan, L. Antiparallel leucine zipper-directed protein reassembly: application to the green fluorescent protein. Journal of the American Chemical Society 122, 5658-5659 (2000).
[0247] 12. Wang, H., La Russa, M. & Qi, L. S. CRISPR/Cas9 in genome editing and beyond. Annual review of biochemistry 85, 227-264 (2016).
[0248] 13. Peng, R., Lin, G. & Li, J. Potential pitfalls of CRISPR/Cas9-mediated genome editing. The FEBS journal 283, 1218-1231 (2016).
[0249] 14. Oceguera-Yanez, F. et al. Engineering the AAVS1 locus for consistent and scalable transgene expression in human iPSCs and their differentiated derivatives. Methods 101, 43-55 (2016).

[0250] All references, patents and patent applications disclosed herein are incorporated by reference with respect to the subject matter for which each is cited, which in some cases may encompass the entirety of the document.

[0251] The indefinite articles “a” and “an,” as used herein in the specification and in the claims, unless clearly indicated to the contrary, should be understood to mean “at least one.”

[0252] It should also be understood that, unless clearly indicated to the contrary, in any methods claimed herein that include more than one step or act, the order of the steps or acts of the method is not necessarily limited to the order in which the steps or acts of the method are recited.

[0253] In the claims, as well as in the specification above, all transitional phrases such as “comprising,” “including,” “carrying,” “having,” “containing,” “involving,” “holding,” “composed of,” and the like are to be understood to be open-ended, i.e., to mean including but not limited to. Only the transitional phrases “consisting of” and “consisting essentially of” shall be closed or semi-closed transitional phrases, respectively, as set forth in the United States Patent Office Manual of Patent Examining Procedures, Section 2111.03.

[0254] The terms “about” and “substantially” preceding a numerical value mean±10% of the recited numerical value.

[0255] Where a range of values is provided, each value between the upper and lower ends of the range are specifically contemplated and described herein.

What is claimed is:

1. A method comprising delivering to eukaryotic cells
(a) a first vector comprising (i) a nucleotide sequence encoding an N-terminal fragment of a selectable marker protein, which is upstream from a nucleotide sequence encoding an N-terminal fragment of an intein and (ii) a nucleotide sequence encoding a first molecule of interest; and
(b) a second vector comprising (i) a nucleotide sequence encoding a C-terminal fragment of the intein, which is upstream from a C-terminal fragment of the selectable marker protein and (ii) a nucleotide sequence encoding a second molecule of interest,
wherein the N-terminal fragment and the C-terminal fragment of the intein catalyze joining of the N-terminal fragment and the C-terminal fragment of the selectable marker protein to produce a full-length selectable marker protein.

2. The method of claim 1 further comprising maintaining the eukaryotic cells under conditions that permit introduction of the first and second vectors into the eukaryotic cells to produce transgenic eukaryotic cells.

3. The method of claim 2 further comprising selecting the transgenic eukaryotic cells that comprise the full-length selectable marker protein.

4. The method of any one of claims 1-3, wherein the eukaryotic cells are mammalian cells.

5. The method of any one of claims 1-4, wherein the selectable marker protein is an antibiotic resistance protein.

6. The method of claim 5, wherein the antibiotic resistance protein confers resistance to hygromycin, G418, puromycin, phleomycin D1 or blasticidin.

7. The method of claim 5 or 6, wherein the antibiotic resistance protein is encoded by a hygB gene, a bsr gene, a pac gene, or a neo gene.

8. The method of any one of claims 1-4, wherein the selectable marker protein is a fluorescent protein.

9. The method of claim 8, wherein the fluorescent protein is selected from TagCFP, mTagCFP2, Czurite, ECFP2, mKalama1, Sirius, Sapphire, T-Sapphire, ECFP, Cerulean, SCFP3C, mTurquoise, mTurquoise2, monomeric Midoriishi-Cyan, TagCFP, mTFP1, EGFP, Emerald, Superfolder GFP, Monomeric Czami Green, TagGFP2, mUKG, mWasabi, Clover, mNeonGreen, EYFP, Citrine, Venus, SYFP2, TagYFP, Monomeric Kusabira-Orange, mKOK, mKO2, mOrange, mOrange2, mRaspberry, mCherry, mStrawberry, mScarlet, mTangerine, tdTomato, TagRFP, TagRFP-T, mCpple, mRuby, mRuby2, mPlum, HcRed-Tandem, mKate2, mNeptune, NirFP, TagRFP657, IFP1.4 and iRFP.

10. The method of any one of claims 1-9, wherein the intein is a split intein.

11. The method of claim 10, wherein the split intein is a natural split, optionally wherein the natural split intein is selected from DnaE inteins, and optionally wherein the DnaE inteins are selected from Synechocystis sp. DnaE (SspDnaE) inteins and Nostoc punctiforme (NpuDnaE) inteins.

12. The method of claim 10, wherein the split intein is an engineered split intein, optionally wherein the engineered split intein is engineered from DnaB inteins or GyrB inteins, and optionally wherein the engineered split intein is a SspDnaB S1 intein or a SspGyrB S11 intein.

13. The method of any one of claims 1-12, wherein the first and/or second molecule is a protein or a non-coding ribonucleic acid (RNA), optionally wherein the non-coding RNA is a microRNA (miRNA), antisense RNA, short-interfering RNA (siRNA) or short-hairpin RNA (shRNA).

14. The method of any one of claims 1-13, wherein the first and/or second vector is a plasmid vector or a viral vector.

15. A eukaryotic cell, comprising
(a) a first vector comprising (i) a nucleotide sequence encoding an N-terminal fragment of a selectable marker protein, which is upstream from a nucleotide sequence encoding an N-terminal fragment of an intein and (ii) a nucleotide sequence encoding a first molecule of interest; and
(b) a second vector comprising (i) a nucleotide sequence encoding a C-terminal fragment of the intein, which is upstream from a C-terminal fragment of the selectable marker protein and (ii) a nucleotide sequence encoding a second molecule of interest,
wherein the N-terminal fragment and the C-terminal fragment of the intein catalyze joining of the N-terminal fragment and the C-terminal fragment of the selectable marker protein to produce a full-length antibiotic resistance protein.

16. A kit, comprising
(a) a first vector comprising a nucleotide sequence encoding an N-terminal fragment of a selectable marker protein, which is upstream from a nucleotide sequence encoding an N-terminal fragment of an intein; and
(b) a second vector comprising a nucleotide sequence encoding a C-terminal fragment of the intein, which is upstream from a C-terminal fragment of the selectable marker protein,
wherein the N-terminal fragment and the C-terminal fragment of the intein catalyze joining of the N-terminal fragment and the C-terminal fragment of the selectable marker protein to produce a full-length selectable marker protein.

17. A method comprising delivering to eukaryotic cells
(a) a first vector comprising (i) a nucleotide sequence encoding an N-terminal fragment of a selectable marker protein, which is upstream from a nucleotide sequence encoding an N-terminal fragment of a first intein and (ii) a nucleotide sequence encoding a first molecule of interest,
(b) a second vector comprising (i) a nucleotide sequence encoding a C-terminal fragment of the first intein, which is upstream from a nucleotide sequence encoding a central fragment of the selectable marker protein, which is upstream from a nucleotide sequence encoding an N-terminal fragment of a second intein and (ii) a nucleotide sequence encoding a second molecule of interest, and
(c) a third vector comprising (i) a nucleotide sequence encoding a C-terminal fragment of the second intein, which is upstream from a nucleotide sequence encoding a C-terminal fragment of the selectable marker protein and (ii) a nucleotide sequence encoding a third molecule of interest,
wherein the N-terminal fragment and the C-terminal fragment of the first intein catalyze joining of N-terminal fragment of the selectable marker protein to the central fragment of the selectable marker protein, and the N-terminal fragment and the C-terminal fragment of the second intein catalyze joining of central fragment of the selectable marker protein to the C-terminal fragment of the selectable marker protein, to produce a full-length selectable marker protein.

18. The method of claim 19 further comprising maintaining the eukaryotic cells under conditions that permit introduction of the first, second, and third vectors into the eukaryotic cells to produce transgenic eukaryotic cells.

19. The method of claim 18 further comprising selecting the transgenic eukaryotic cells that comprise the full-length selectable marker protein.

20. A eukaryotic cell comprising:
(a) a first vector comprising (i) a nucleotide sequence encoding an N-terminal fragment of a selectable marker protein, which is upstream from a nucleotide sequence encoding an N-terminal fragment of a first intein and (ii) a nucleotide sequence encoding a first molecule of interest,
(b) a second vector comprising (i) a nucleotide sequence encoding a C-terminal fragment of the first intein, which is upstream from a nucleotide sequence encoding a central fragment of the selectable marker protein, which is upstream from a nucleotide sequence encoding an N-terminal fragment of a second intein and (ii) a nucleotide sequence encoding a second molecule of interest, and
(c) a third vector comprising (i) a nucleotide sequence encoding a C-terminal fragment of the second intein, which is upstream from a nucleotide sequence encoding a C-terminal fragment of the selectable marker protein and (ii) a nucleotide sequence encoding a third molecule of interest,
wherein the N-terminal fragment and the C-terminal fragment of the first intein catalyze joining of N-terminal fragment of the selectable marker protein to the central fragment of the selectable marker protein, and the N-terminal fragment and the C-terminal fragment of the second intein catalyze joining of central fragment of the selectable marker protein to the C-terminal fragment of the selectable marker protein, to produce a full-length selectable marker protein.

21. A kit comprising:
(a) a first vector comprising a nucleotide sequence encoding an N-terminal fragment of a selectable marker protein, which is upstream from a nucleotide sequence encoding an N-terminal fragment of a first intein,
(b) a second vector comprising a nucleotide sequence encoding a C-terminal fragment of the first intein, which is upstream from a nucleotide sequence encoding a central fragment of the selectable marker protein, which is upstream from a nucleotide sequence encoding an N-terminal fragment of a second intein, and
(c) a third vector comprising a nucleotide sequence encoding a C-terminal fragment of the second intein, which is upstream from a nucleotide sequence encoding a C-terminal fragment of the selectable marker protein,
wherein the N-terminal fragment and the C-terminal fragment of the first intein catalyze joining of N-terminal fragment of the selectable marker protein to the central fragment of the selectable marker protein, and the N-terminal fragment and the C-terminal fragment of the second intein catalyze joining of central fragment of the selectable marker protein to the C-terminal fragment of the selectable marker protein, to produce a full-length selectable marker protein.

The application's sequence listing, which the Patent Office published only in electronic form, follows.

SEQUENCE LISTING (218 sequences)

SEQ ID NO: 1 - protein, 341 aa, Artificial Sequence
  Synthetic Polypeptide
MKKPELTATSVEKFLIEKFDSVSDLMQLSEGEESRAFSFDVGGRGYVLRVNSCADGFYKDRYVYRHFASAALPIPEVLDIGEFSESLTYCISRRAQGVTLQDLPETELPAVLQPVAEAMDAIAAADLSQTSGFGPFGPQGIGQYTTWRDFICAIADPHVYHWQTVMDDTVSASVAQALDELMLWAEDCPEVRHLVHADFGSNNVLTDNGRITAVIDWSEAMFGDSQYEVANIFFWRPWLACMEQQTRYFERRHPELAGSPRLRAYMLRIGLDQLYQSLVDGNFDDAAWAQGRCDAIVRSGAGTVGRTQIARRSAAVWTDGCVEVLADSGNRRPSTRPRAKE

SEQ ID NO: 2 - protein, 199 aa, Artificial Sequence
  Synthetic Polypeptide
MTEYKPTVRLATRDDVPRAVRTLAAAFADYPATRHTVDPDRHIERVTELQELFLTRVGLDIGKVWVADDGAAVAVWTTPESVEAGAVFAEIGPRMAELSGSRLAAQQQMEGLLAPHRPKEPAWFLATVGVSPDHQGKGLGSAVVLPGVEAAERAGVPAFLETSAPRNLPFYERLGFTVTADVEVPEGPRTWCMTRKPGA

SEQ ID NO: 3 - protein, 264 aa, Artificial Sequence [sequence omitted]

SEQ ID NO: 4 - protein, 140 aa, Artificial Sequence
  Synthetic Polypeptide
MKTFNISQQDLELVEVATEKITMLYEDNKHHVGAAIRTKTGEIISAVHIEAYIGRVTVCAEAIAIGSAVSNGQKDFDTIVAVRHPYSDEVDRSIRVVSPCGMCRELISDYAPDCFVLIEMNGKLVKTTIEELIPLKYTRN

SEQ ID NO: 5 - protein, 239 aa, Artificial Sequence
  Synthetic Polypeptide
MVSKGEELFTGVVPILVELDGDVNGHKFSVSGEGEGDATYGKLTLKFICTTGKLPVPWPTLVTTLTYGVQCFSRYPDHMKQHDFFKSAMPEGYVQERTIFFKDDGNYKTRAEVKFEGDTLVNRIELKGIDFKEDGNILGHKLEYNYNSHNVYIMADKQKNGIKVNFKIRHNIEDGSVQLADHYQQNTPIGDGPVLLPDNHYLSTQSALSKDPNEKRDHMVLLEFVTAAGITLGMDELYK

SEQ ID NO: 6 - protein, 232 aa, Artificial Sequence
  Synthetic Polypeptide
MVSKGEAVIKEFMRFKVHMEGSMNGHEFEIEGEGEGRPYEGTQTAKLKVTKGGPLPFSWDILSPQFMYGSRAFTKHPADIPDYYKQSFPEGFKWERVMNFEDGGAVTVTQDTSLEDGTLIYKVKLRGTNFPPDGPVMQKKTMGWEASTERLYPEDGVLKGDIKMALRLKDGGRYLADFKTTYKAKKPVQMPGAYNVDRKLDITSHNEDYTVVEQYERSEGRHSTGGMDELYK

SEQ ID NO: 7 - protein, 102 aa, Artificial Sequence
  Synthetic Polypeptide
CLSYETEILTVEYGLLPIGKIVEKRIECTVYSVDNNGNIYTQPVAQWHDRGEQEVFEYCLEDGSLIRATKDHKFMTVDGQMLPIDEIFERELDLMRVDNLPN

SEQ ID NO: 8 - protein, 35 aa, Artificial Sequence
  Synthetic Polypeptide
IKIATRKYLGKQNVYDIGVERDHNFALKNGFIASN

SEQ ID NO: 9 - protein, 106 aa, Artificial Sequence
  Synthetic Polypeptide
CISGDSLISLASTGKRVSIKDLLDEKDFEIWAINEQTMKLESAKVSRVFCTGKKLVYILKTRLGRTIKATANHRFLTIDGWKRLDELSLKEHIALPRKLESSSLQL

SEQ ID NO: 10 - protein, 48 aa, Artificial Sequence
  Synthetic Polypeptide
SPEIEKLSQSDIYWDSIVSITETGVEEVFDLTVPGPHNFVANDIIVHN

SEQ ID NO: 11 - protein, 139 aa, Artificial Sequence
  Synthetic Polypeptide
CLSYETEILTVEYGLLPIGKIVEKRIECTVYSVDNNGNIYTQPVAQWHDRGEQEVFEYCLEDGSLIRATKDHKFMTVDGQMLPIDEIFERELDLMRVDNLPNGGGGSGSAQLEKELQALEKKLAQLEWENQALEKELAQ

SEQ ID NO: 12 - protein, 68 aa, Artificial Sequence
  Synthetic Polypeptide
AQLKKKLQANKKELAQLKWKLQALKKKLAQGGGGSGSMIKIATRKYLGKQNVYDIGVGEPHNFALKNG

SEQ ID NO: 13 - protein, 35 aa, Artificial Sequence
  Synthetic Polypeptide
IKIATRKYLGKQNVYDIGVGEPHNFALKNGFIASN

SEQ ID NO: 14 - protein, 30 aa, Artificial Sequence
  Synthetic Polypeptide
AQLEKELQALEKKLAQLEWENQALEKELAQ

SEQ ID NO: 15 - protein, 29 aa, Artificial Sequence
  Synthetic Polypeptide
AQLKKKLQANKKELAQLKWKLQALKKKLA

SEQ ID NO: 16 - protein, 123 aa, Artificial Sequence
  Synthetic Polypeptide
CLSFGTEILTVEYGPLPIGKIVSEEINCSVYSVDPEGRVYTQAIAQWHDRGEQEVLEYELEDGSVIRATSDHRFLTTDYQLLAIEEIFARQLDLLTLENIKQTEEALDNHRLPFPLLDAGTIK

SEQ ID NO: 17 - protein, 35 aa, Artificial Sequence
  Synthetic Polypeptide
VKVIGRRSLGVQRIFDIGLPQDHNFLLANGAIAAN

SEQ ID NO: 18 - protein, 11 aa, Artificial Sequence
  Synthetic Polypeptide
CISGDSLISLA

SEQ ID NO: 19 - protein, 143 aa, Artificial Sequence
  Synthetic Polypeptide
STGKRVSIKDLLDEKDFEIWAINEQTMKLESAKVSRVFCTGKKLVYILKTRLGRTIKATANHRFLTIDGWKRLDELSLKEHIALPRKLESSSLQLSPEIEKLSQSDIYWDSIVSITETGVEEVFDLTVPGPHNFVANDIIVHN

SEQ ID NO: 20 - DNA, 9219 bp, Artificial Sequence
  Synthetic Polynucleotide
cccggggttattaatagtaatcaattacggggtcattagttcatagcccatatatggagttccgcgttacataacttacggtaaatggcccgcctggctgaccgcccaacgacccccgcccattgacgtcaataatgacgtatgttcccatagtaacgccaatagggactttccattgacgtcaatgggtggagtatttacggtaaactgcccacttggcagtacatcaagtgtatcatatgccaagtacgccccctattgacgtcaatgacggtaaatggcccgcctggcattatgcccagtacatgaccttatgggactttcctacttggcagtacatctacgtattagtcatcgctattaccatggtgatgcggttttggcagtacatcaatgggcgtggatagcggtttgactcacggggatttccaagtctccaccccattgacgtcaatgggagtttgttttggcaccaaaatcaacgggactttccaaaatgtcgtaacaactccgccccattgacgcaaatgggcggtaggcgtgtacggtgggaggtctatataagcagagctctctggctaactgtcgggatcaacaagtttgtacaaaaaagcaggctccgaattcaccggtgccaccatgaaaaagcctgaactcaccgcgacgtctgtcgagaagtttctgatcgaaaagttcgacagcgtctccgacctgatgcagctctcggagggcgaagaatctcgtgctttcagcttcgatgtaggagggcgtggatatgtcctgcgggtaaatagctgcgccgatggtttctacaaagatcgttatgtttatcggcactttgcatcggccgcgctcccgattccggaagtgcttgacattggggaatttagcgagagcctgacctattgcctttcatacgagaccgagatcctgactgtcgagtacggattgcttcctatcggcaaaatcgtggagaagaggattgaatgtaccgtctattcagtcgataataatgggaacatctacacacagcccgtggctcaatggcacgacagaggagagcaggaagtttttgaatactgtctcgaggacggatccctcatccgcgctactaaagatcataagtttatgaccgtggacggccagatgctgccaattgacgaaatttttgaacgagagctggatctgatgagagtcgacaaccttccaaactgattaattaagaattcgacccagctttcttgtacaaagtggttggtaagcctatccctaaccctctcctcggtctcgattctacgtagtaatgagctagcagtctcgaggttaacgaattccgccccccccctaacgttactggccgaagccgcttggaataaggccggtgtgcgcttgtctatatgttattttccaccatattgccgtcttttggcaatgtgagggcccggaaacctggccctgtcttcttgacgagcattcctaggggtctttcccctctcgccaaaggaatgcaaggtctgttgaatgtcgtgaaggaagcagttcctctggaagcttcttgaagacaaacaacgtctgtagcgaccctttgcaggcagcggaaccccccacctggcgacaggtgcccctgcggccaaaagccacgtgtataagatacacctgcaaaggcggcacaaccccagtgccacgttgtgagttggatagttgtggaaagagtcaaatggctctcctcaagcgtattcaacaaggggctgaaggatgcccagaaggtaccccattgtatgggatctgatctggggcctcggtgcacatgctttacatgtgtttagtcgaggttaaaaaaacgtctaggccccccgaaccacggggacgtggttttcctttgaaaaacacgataataccatggccatgagcgagctgattaaggagaacatgcacatgaagctgtacatggagggcaccgtggacaaccatcacttcaagtgcacatccgagggcgaaggcaagccctacgagggcacccagaccatgagaatcaaggtggtcgagggcggccctctccccttcgccttcgacatcctggctactagcttcctctacggcagcaagaccttcatcaaccacacccagggcatccccgacttcttcaagcagtccttccctgagggcttcacatgggagagagtcaccacatacgaagacgggggcgtgctgaccgctacccaggacaccagcctccaggacggctgcctcatctacaacgtcaagatcagaggggtgaacttcacatccaacggccctgtgatgcagaagaaaacactcggctgggaggccttcaccgagacgctgtaccccgctgacggcggcctggaaggcagaaacgacatggccctgaagctcgtgggcgggagccatctgatcgcaaacatcaagaccacatatagatccaagaaacccgctaagaacctcaagatgcctggcgtctactatgtggactacagactggaaagaatcaaggaggccaacaacgagacctacgtcgagcagcacgaggtggcagtggccagatactgcgacctccctagcaaactggggcacaagcttaattaacaccggtggcgcgttaagtcgacaatcaacctctggattacaaaatttgtgaaagattgactggtattcttaactatgttgctccttttacgctatgtggatacgctgctttaatgcctttgtatcatgctattgcttcccgtatggctttcattttctcctccttgtataaatcctggttgctgtctctttatgaggagttgtggcccgttgtcaggcaacgtggcgtggtgtgcactgtgtttgctgacgcaacccccactggttggggcattgccaccacctgtcagctcctttccgggactttcgctttccccctccctattgccacggcggaactcatcgccgcctgccttgcccgctgctggacaggggctcggctgttgggcactgacaattccgtggtgttgtcggggaaatcatcgtcctttccttggctgctcgcctgtgttgccacctggattctgcgcgggacgtccttctgctacgtcccttcggccctcaatccagcggaccttccttcccgcggcctgctgccggctctgcggcctcttccgcgtcttcgccttcgccctcagacgagtcggatctccctttgggccgcctccccgcgtcgactttaagaccaatgacttacaaggcagctgtagatcttagccactttttaaaagaaaaggggggactggaagggctaattcactcccaacgaagacaagatctgctttttgcttgtactgggtctctctggttagaccagatctgagcctgggagctctctggctaactagggaacccactgcttaagcctcaataaagcttgccttgagtgcttcaagtagtgtgtgcccgtctgttgtgtgactctggtaactagagatccctcagacccttttagtcagtgtggaaaatctctagcagtacgtatagtagttcatgtcatcttattattcagtatttataacttgcaaagaaatgaatatcagagagtgagaggaacttgtttattgcagcttataatggttacaaataaagcaatagcatcacaaatttcacaaataaagcatttttttcactgcattctagttgtggtttgtccaaactcatcaatgtatcttatcatgtctggctctagctatcccgcccctaactccgcccatcccgcccctaactccgcccagttccgcccattctccgccccatggctgactaattttttttatttatgcagaggccgaggccgcctcggcctctgagctattccagaagtagtgaggaggcttttttggaggcctagggacgtacccaattcgccctatagtgagtcgtattacgcgcgctcactggccgtcgttttacaacgtcgtgactgggaaaaccctggcgttacccaacttaatcgccttgcagcacatccccctttcgccagctggcgtaatagcgaagaggcccgcaccgatcgcccttcccaacagttgcgcagcctgaatggcgaatgggacgcgccctgtagcggcgcattaagcgcggcgggtgtggtggttacgcgcagcgtgaccgctacacttgccagcgccctagcgcccgctcctttcgctttcttcccttcctttctcgccacgttcgccggctttccccgtcaagctctaaatcgggggctccctttagggttccgatttagtgctttacggcacctcgaccccaaaaaacttgattagggtgatggttcacgtagtgggccatcgccctgatagacggtttttcgccctttgacgttggagtccacgttctttaatagtggactcttgttccaaactggaacaacactcaaccctatctcggtctattcttttgatttataagggattttgccgatttcggcctattggttaaaaaatgagctgatttaacaaaaatttaacgcgaattttaacaaaatattaacgcttacaatttaggtggcacttttcggggaaatgtgcgcggaacccctatttgtttatttttctaaatacattcaaatatgtatccgctcatgagacaataaccctgataaatgcttcaataatattgaaaaaggaagagtatgagtattcaacatttccgtgtcgcccttattcccttttttgcggcattttgccttcctgtttttgctcacccagaaacgctggtgaaagtaaaagatgctgaagatcagttgggtgcacgagtgggttacatcgaactggatctcaacagcggtaagatccttgagagttttcgccccgaagaacgttttccaatgatgagcacttttaaagttctgctatgtggcgcggtattatcccgtattgacgccgggcaagagcaactcggtcgccgcatacactattctcagaatgacttggttgagtactcaccagtcacagaaaagcatcttacggatggcatgacagtaagagaattatgcagtgctgccataaccatgagtgataacactgcggccaacttacttctgacaacgatcggaggaccgaaggagctaaccgcttttttgcacaacatgggggatcatgtaactcgccttgatcgttgggaaccggagctgaatgaagccataccaaacgacgagcgtgacaccacgatgcctgtagcaatggcaacaacgttgcgcaaactattaactggcgaactacttactctagcttcccggcaacaattaatagactggatggaggcggataaagttgcaggaccacttctgcgctcggcccttccggctggctggtttattgctgataaatctggagccggtgagcgtgggtctcgcggtatcattgcagcactggggccagatggtaagccctcccgtatcgtagttatctacacgacggggagtcaggcaactatggatgaacgaaatagacagatcgctgagataggtgcctcactgattaagcattggtaactgtcagaccaagtttactcatatatactttagattgatttaaaacttcatttttaatttaaaaggatctaggtgaagatcctttttgataatctcatgaccaaaatcccttaacgtgagttttcgttccactgagcgtcagaccccgtagaaaagatcaaaggatcttcttgagatcctttttttctgcgcgtaatctgctgcttgcaaacaaaaaaaccaccgctaccagcggtggtttgtttgccggatcaagagctaccaactctttttccgaaggtaactggcttcagcagagcgcagataccaaatactgttcttctagtgtagccgtagttaggccaccacttcaagaactctgtagcaccgcctacatacctcgctctgctaatcctgttaccagtggctgctgccagtggcgataagtcgtgtcttaccgggttggactcaagacgatagttaccggataaggcgcagcggtcgggctgaacggggggttcgtgcacacagcccagcttggagcgaacgacctacaccgaactgagatacctacagcgtgagctatgagaaagcgccacgcttcccgaagggagaaaggcggacaggtatccggtaagcggcagggtcggaacaggagagcgcacgagggagcttccagggggaaacgcctggtatctttatagtcctgtcgggtttcgccacctctgacttgagcgtcgatttttgtgatgctcgtcaggggggcggagcctatggaaaaacgccagcaacgcggcctttttacggttcctggccttttgctggccttttgctcacatgttctttcctgcgttatcccctgattctgtggataaccgtattaccgcctttgagtgagctgataccgctcgccgcagccgaacgaccgagcgcagcgagtcagtgagcgaggaagcggaagagcgcccaatacgcaaaccgcctctccccgcgcgttggccgattcattaatgcagctggcacgacaggtttcccgactggaaagcgggcagtgagcgcaacgcaattaatgtgagttagctcactcattaggcaccccaggctttacactttatgcttccggctcgtatgttgtgtggaattgtgagcggataacaatttcacacaggaaacagctatgaccatgattacgccaagcgcgcaattaaccctcactaaagggaacaaaagctggagctgcaagcttaatgtagtcttatgcaatactcttgtagtcttgcaacatggtaacgatgagttagcaacatgccttacaaggagagaaaaagcaccgtgcatgccgattggtggaagtaaggtggtacgatcgtgccttattaggaaggcaacagacgggtctgacatggattggacgaaccactgaattgccgcattgcagagatattgtatttaagtgcctagctcgatacataaacgggtctctctggttagaccagatctgagcctgggagctctctggctaactagggaacccactgcttaagcctcaataaagcttgccttgagtgcttcaagtagtgtgtgcccgtctgttgtgtgactctggtaactagagatccctcagacccttttagtcagtgtggaaaatctctagcagtggcgcccgaacagggacttgaaagcgaaagggaaaccagaggagctctctcgacgcaggactcggcttgctgaagcgcgcacggcaagaggcgaggggcggcgactggtgagtacgccaaaaattttgactagcggaggctagaaggagagagatgggtgcgagagcgtcagtattaagcgggggagaattagatcgcgatgggaaaaaattcggttaaggccagggggaaagaaaaaatataaattaaaacatatagtatgggcaagcagggagctagaacgattcgcagttaatcctggcctgttagaaacatcagaaggctgtagacaaatactgggacagctacaaccatcccttcagacaggatcagaagaacttagatcattatataatacagtagcaaccctctattgtgtgcatcaaaggatagagataaaagacaccaaggaagctttagacaagatagaggaagagcaaaacaaaagtaagaccaccgcacagcaagcggccgctgatcttcagacctggaggaggagatatgagggacaattggagaagtgaattatataaatataaagtagtaaaaattgaaccattaggagtagcacccaccaaggcaaagagaagagtggtgcagagagaaaaaagagcagtgggaataggagctttgttccttgggttcttgggagcagcaggaagcactatgggcgcagcgtcaatgacgctgacggtacaggccagacaattattgtctggtatagtgcagcagcagaacaatttgctgagggctattgaggcgcaacagcatctgttgcaactcacagtctggggcatcaagcagctccaggcaagaatcctggctgtggaaagatacctaaaggatcaacagctcctggggatttggggttgctctggaaaactcatttgcaccactgctgtgccttggaatgctagttggagtaataaatctctggaacagatttggaatcacacgacctggatggagtgggacagagaaattaacaattacacaagcttaatacactccttaattgaagaatcgcaaaaccagcaagaaaagaatgaacaagaattattggaattagataaatgggcaagtttgtggaattggtttaacataacaaattggctgtggtatataaaattattcataatgatagtaggaggcttggtaggtttaagaatagtttttgctgtactttctatagtgaatagagttaggcagggatattcaccattatcgtttcagacccacctcccaaccccgaggggacccttgcgccttttccaaggcagccctgggtttgcgcagggacgcggctgctctgggcgtggttccgggaaacgcagcggcgccgaccctgggtctcgcacattcttcacgtccgttcgcagcgtcacccggatcttcgccgctacccttgtgggccccccggcgacgcttcctgctccgcccctaagtcgggaaggttccttgcggttcgcggcgtgccggacgtgacaaacggaagccgcacgtctcactagtaccctcgcagacggacagcgccagggagcaatggcagcgcgccgaccgcgatgggctgtggccaatagcggctgctcagcagggcgcgccgagagcagcggccgggaaggggcggtgcgggaggcggggtgtggggcggtagtgtgggccctgttcctgcccgcgcggtgttccgcattctgcaagcctccggagcgcacgtcggcagtcggctccctcgttgaccgaatcaccgacctctctccccagggggtacccagctgtctagagaattctagatcttgagacaaatggcagtattcatccacaattttaaaagaaaaggggggattggggggtacagtgcaggggaaagaatagtagacataatagcaacagacatacaaactaaagaattacaaaaacaaattacaaaaattcaaaattttcgggtttattacagggacagcagagatccactttggcgccggctcgaggggg

SEQ ID NO: 21 - protein, 191 aa, Artificial Sequence
  Synthetic Polypeptide
MKKPELTATSVEKFLIEKFDSVSDLMQLSEGEESRAFSFDVGGRGYVLRVNSCADGFYKDRYVYRHFASAALPIPEVLDIGEFSESLTYCLSYETEILTVEYGLLPIGKIVEKRIECTVYSVDNNGNIYTQPVAQWHDRGEQEVFEYCLEDGSLIRATKDHKFMTVDGQMLPIDEIFERELDLMRVDNLPN

SEQ ID NO: 22 - DNA, 9516 bp, Artificial Sequence
  Synthetic Polynucleotide
cccggggttattaatagtaatcaattacggggtcattagttcatagcccatatatggagttccgcgttacataacttacggtaaatggcccgcctggctgaccgcccaacgacccccgcccattgacgtcaataatgacgtatgttcccatagtaacgccaatagggactttccattgacgtcaatgggtggagtatttacggtaaactgcccacttggcagtacatcaagtgtatcatatgccaagtacgccccctattgacgtcaatgacggtaaatggcccgcctggcattatgcccagtacatgaccttatgggactttcctacttggcagtacatctacgtattagtcatcgctattaccatggtgatgcggttttggcagtacatcaatgggcgtggatagcggtttgactcacggggatttccaagtctccaccccattgacgtcaatgggagtttgttttggcaccaaaatcaacgggactttccaaaatgtcgtaacaactccgccccattgacgcaaatgggcggtaggcgtgtacggtgggaggtctatataagcagagctctctggctaactgtcgggatcaacaagtttgtacaaaaaagcaggctccgaattcaccggtgccgccaccatgattaagatcgctacgcggaagtacctggggaaacagaacgtctacgacataggtgtggagcgcgatcacaactttgctctgaaaaatggatttatcgccagcaactgcatctcccgccgtgcacagggtgtcacgttgcaagacctgcctgaaaccgaactgcccgctgttctgcagccggtcgcggaggccatggatgcgatcgctgcggccgatcttagccagacgagcgggttcggcccattcggaccgcaaggaatcggtcaatacactacatggcgtgatttcatatgcgcgattgctgatccccatgtgtatcactggcaaactgtgatggacgacaccgtcagtgcgtccgtcgcgcaggctctcgatgagctgatgctttgggccgaggactgccccgaagtccggcacctcgtgcacgcggatttcggctccaacaatgtcctgacggacaatggccgcataacagcggtcattgactggagcgaggcgatgttcggggattcccaatacgaggtcgccaacatcttcttctggaggccgtggttggcttgtatggagcagcagacgcgctacttcgagcggaggcatccggagcttgcaggatcgccgcggctccgggcgtatatgctccgcattggtcttgaccaactctatcagagcttggttgacggcaatttcgatgatgcagcttgggcgcagggtcgatgcgacgcaatcgtccgatccggagccgggactgtcgggcgtacacaaatcgcccgcagaagcgcggccgtctggaccgatggctgtgtagaagtactcgccgatagtggaaaccgacgccccagcactcgtccgagggcaaaggaatagttaattaagaattcgacccagctttcttgtacaaagtggttggtaagcctatccctaaccctctcctcggtctcgattctacgtagtaatgagctagcagtctcgaggttaacgaattccgccccccccctaacgttactggccgaagccgcttggaataaggccggtgtgcgcttgtctatatgttattttccaccatattgccgtcttttggcaatgtgagggcccggaaacctggccctgtcttcttgacgagcattcctaggggtctttcccctctcgccaaaggaatgcaaggtctgttgaatgtcgtgaaggaagcagttcctctggaagcttcttgaagacaaacaacgtctgtagcgaccctttgcaggcagcggaaccccccacctggcgacaggtgcccctgcggccaaaagccacgtgtataagatacacctgcaaaggcggcacaaccccagtgccacgttgtgagttggatagttgtggaaagagtcaaatggctctcctcaagcgtattcaacaaggggctgaaggatgcccagaaggtaccccattgtatgggatctgatctggggcctcggtgcacatgctttacatgtgtttagtcgaggttaaaaaaacgtctaggccccccgaaccacggggacgtggttttcctttgaaaaacacgataataccatggtgagcaagggcgaggaggataacatggccatcatcaaggagttcatgcgcttcaaggtgcacatggagggctccgtgaacggccacgagttcgagatcgagggcgagggcgagggccgcccctacgagggcacccagaccgccaagctgaaggtgaccaagggtggccccctgcccttcgcctgggacatcctgtcccctcagttcatgtacggctccaaggcctacgtgaagcaccccgccgacatccccgactacttgaagctgtccttccccgagggcttcaagtgggagcgcgtgatgaacttcgaggacggcggcgtggtgaccgtgacccaggactcctccctgcaggacggcgagttcatctacaaggtgaagctgcgcggcaccaacttcccctccgacggccccgtaatgcagaagaagaccatgggctgggaggcctcctccgagcggatgtaccccgaggacggcgccctgaagggcgagatcaagcagaggctgaagctgaaggacggcggccactacgacgctgaggtcaagaccacctacaaggccaagaagcccgtgcagctgcccggcgcctacaacgtcaacatcaagttggacatcacctcccacaacgaggactacaccatcgtggaacagtacgaacgcgccgagggccgccactccaccggcggcatggacgagctgtacaagtaacaccggtggcgcgttaagtcgacaatcaacctctggattacaaaatttgtgaaagattgactggtattcttaactatgttgctccttttacgctatgtggatacgctgctttaatgcctttgtatcatgctattgcttcccgtatggctttcattttctcctccttgtataaatcctggttgctgtctctttatgaggagttgtggcccgttgtcaggcaacgtggcgtggtgtgcactgtgtttgctgacgcaacccccactggttggggcattgccaccacctgtcagctcctttccgggactttcgctttccccctccctattgccacggcggaactcatcgccgcctgccttgcccgctgctggacaggggctcggctgttgggcactgacaattccgtggtgttgtcggggaaatcatcgtcctttccttggctgctcgcctgtgttgccacctggattctgcgcgggacgtccttctgctacgtcccttcggccctcaatccagcggaccttccttcccgcggcctgctgccggctctgcggcctcttccgcgtcttcgccttcgccctcagacgagtcggatctccctttgggccgcctccccgcgtcgactttaagaccaatgacttacaaggcagctgtagatcttagccactttttaaaagaaaaggggggactggaagggctaattcactcccaacgaagacaagatctgctttttgcttgtactgggtctctctggttagaccagatctgagcctgggagctctctggctaactagggaacccactgcttaagcctcaataaagcttgccttgagtgcttcaagtagtgtgtgcccgtctgttgtgtgactctggtaactagagatccctcagacccttttagtcagtgtggaaaatctctagcagtacgtatagtagttcatgtcatcttattattcagtatttataacttgcaaagaaatgaatatcagagagtgagaggaacttgtttattgcagcttataatggttacaaataaagcaatagcatcacaaatttcacaaataaagcatttttttcactgcattctagttgtggtttgtccaaactcatcaatgtatcttatcatgtctggctctagctatcccgcccctaactccgcccatcccgcccctaactccgcccagttccgcccattctccgccccatggctgactaattttttttatttatgcagaggccgaggccgcctcggcctctgagctattccagaagtagtgaggaggcttttttggaggcctagggacgtacccaattcgccctatagtgagtcgtattacgcgcgctcactggccgtcgttttacaacgtcgtgactgggaaaaccctggcgttacccaacttaatcgccttgcagcacatccccctttcgccagctggcgtaatagcgaagaggcccgcaccgatcgcccttcccaacagttgcgcagcctgaatggcgaatgggacgcgccctgtagcggcgcattaagcgcggcgggtgtggtggttacgcgcagcgtgaccgctacacttgccagcgccctagcgcccgctcctttcgctttcttcccttcctttctcgccacgttcgccggctttccccgtcaagctctaaatcgggggctccctttagggttccgatttagtgctttacggcacctcgaccccaaaaaacttgattagggtgatggttcacgtagtgggccatcgccctgatagacggtttttcgccctttgacgttggagtccacgttctttaatagtggactcttgttccaaactggaacaacactcaaccctatctcggtctattcttttgatttataagggattttgccgatttcggcctattggttaaaaaatgagctgatttaacaaaaatttaacgcgaattttaacaaaatattaacgcttacaatttaggtggcacttttcggggaaatgtgcgcggaacccctatttgtttatttttctaaatacattcaaatatgtatccgctcatgagacaataaccctgataaatgcttcaataatattgaaaaaggaagagtatgagtattcaacatttccgtgtcgcccttattcccttttttgcggcattttgccttcctgtttttgctcacccagaaacgctggtgaaagtaaaagatgctgaagatcagttgggtgcacgagtgggttacatcgaactggatctcaacagcggtaagatccttgagagttttcgccccgaagaacgttttccaatgatgagcacttttaaagttctgctatgtggcgcggtattatcccgtattgacgccgggcaagagcaactcggtcgccgcatacactattctcagaatgacttggttgagtactcaccagtcacagaaaagcatcttacggatggcatgacagtaagagaattatgcagtgctgccataaccatgagtgataacactgcggccaacttacttctgacaacgatcggaggaccgaaggagctaaccgcttttttgcacaacatgggggatcatgtaactcgccttgatcgttgggaaccggagctgaatgaagccataccaaacgacgagcgtgacaccacgatgcctgtagcaatggcaacaacgttgcgcaaactattaactggcgaactacttactctagcttcccggcaacaattaatagactggatggaggcggataaagttgcaggaccacttctgcgctcggcccttccggctggctggtttattgctgataaatctggagccggtgagcgtgggtctcgcggtatcattgcagcactggggccagatggtaagccctcccgtatcgtagttatctacacgacggggagtcaggcaactatggatgaacgaaatagacagatcgctgagataggtgcctcactgattaagcattggtaactgtcagaccaagtttactcatatatactttagattgatttaaaacttcatttttaatttaaaaggatctaggtgaagatcctttttgataatctcatgaccaaaatcccttaacgtgagttttcgttccactgagcgtcagaccccgtagaaaagatcaaaggatcttcttgagatcctttttttctgcgcgtaatctgctgcttgcaaacaaaaaaaccaccgctaccagcggtggtttgtttgccggatcaagagctaccaactctttttccgaaggtaactggcttcagcagagcgcagataccaaatactgttcttctagtgtagccgtagttaggccaccacttcaagaactctgtagcaccgcctacatacctcgctctgctaatcctgttaccagtggctgctgccagtggcgataagtcgtgtcttaccgggttggactcaagacgatagttaccggataaggcgcagcggtcgggctgaacggggggttcgtgcacacagcccagcttggagcgaacgacctacaccgaactgagatacctacagcgtgagctatgagaaagcgccacgcttcccgaagggagaaaggcggacaggtatccggtaagcggcagggtcggaacaggagagcgcacgagggagcttccagggggaaacgcctggtatctttatagtcctgtcgggtttcgccacctctgacttgagcgtcgatttttgtgatgctcgtcaggggggcggagcctatggaaaaacgccagcaacgcggcctttttacggttcctggccttttgctggccttttgctcacatgttctttcctgcgttatcccctgattctgtggataaccgtattaccgcctttgagtgagctgataccgctcgccgcagccgaacgaccgagcgcagcgagtcagtgagcgaggaagcggaagagcgcccaatacgcaaaccgcctctccccgcgcgttggccgattcattaatgcagctggcacgacaggtttcccgactggaaagcgggcagtgagcgcaacgcaattaatgtgagttagctcactcattaggcaccccaggctttacactttatgcttccggctcgtatgttgtgtggaattgtgagcggataacaatttcacacaggaaacagctatgaccatgattacgccaagcgcgcaattaaccctcactaaagggaacaaaagctggagctgcaagcttaatgtagtcttatgcaatactcttgtagtcttgcaacatggtaacgatgagttagcaacatgccttacaaggagagaaaaagcaccgtgcatgccgattggtggaagtaaggtggtacgatcgtgccttattaggaaggcaacagacgggtctgacatggattggacgaaccactgaattgccgcattgcagagatattgtatttaagtgcctagctcgatacataaacgggtctctctggttagaccagatctgagcctgggagctctctggctaactagggaacccactgcttaagcctcaataaagcttgccttgagtgcttcaagtagtgtgtgcccgtctgttgtgtgactctggtaactagagatccctcagacccttttagtcagtgtggaaaatctctagcagtggcgcccgaacagggacttgaaagcgaaagggaaaccagaggagctctctcgacgcaggactcggcttgctgaagcgcgcacggcaagaggcgaggggcggcgactggtgagtacgccaaaaattttgactagcggaggctagaaggagagagatgggtgcgagagcgtcagtattaagcgggggagaattagatcgcgatgggaaaaaattcggttaaggccagggggaaagaaaaaatataaattaaaacatatagtatgggcaagcagggagctagaacgattcgcagttaatcctggcctgttagaaacatcagaaggctgtagacaaatactgggacagctacaaccatcccttcagacaggatcagaagaacttagatcattatataatacagtagcaaccctctattgtgtgcatcaaaggatagagataaaagacaccaaggaagctttagacaagatagaggaagagcaaaacaaaagtaagaccaccgcacagcaagcggccgctgatcttcagacctggaggaggagatatgagggacaattggagaagtgaattatataaatataaagtagtaaaaattgaaccattaggagtagcacccaccaaggcaaagagaagagtggtgcagagagaaaaaagagcagtgggaataggagctttgttccttgggttcttgggagcagcaggaagcactatgggcgcagcgtcaatgacgctgacggtacaggccagacaattattgtctggtatagtgcagcagcagaacaatttgctgagggctattgaggcgcaacagcatctgttgcaactcacagtctggggcatcaagcagctccaggcaagaatcctggctgtggaaagatacctaaaggatcaacagctcctggggatttggggttgctctggaaaactcatttgcaccactgctgtgccttggaatgctagttggagtaataaatctctggaacagatttggaatcacacgacctggatggagtgggacagagaaattaacaattacacaagcttaatacactccttaattgaagaatcgcaaaaccagcaagaaaagaatgaacaagaattattggaattagataaatgggcaagtttgtggaattggtttaacataacaaattggctgtggtatataaaattattcataatgatagtaggaggcttggtaggtttaagaatagtttttgctgtactttctatagtgaatagagttaggcagggatattcaccattatcgtttcagacccacctcccaaccccgaggggacccttgcgccttttccaaggcagccctgggtttgcgcagggacgcggctgctctgggcgtggttccgggaaacgcagcggcgccgaccctgggtctcgcacattcttcacgtccgttcgcagcgtcacccggatcttcgccgctacccttgtgggccccccggcgacgcttcctgctccgcccctaagtcgggaaggttccttgcggttcgcggcgtgccggacgtgacaaacggaagccgcacgtctcactagtaccctcgcagacggacagcgccagggagcaatggcagcgcgccgaccgcgatgggctgtggccaatagcggctgctcagcagggcgcgccgagagcagcggccgggaaggggcggtgcgggaggcggggtgtggggcggtagtgtgggccctgttcctgcccgcgcggtgttccgcattctgcaagcctccggagcgcacgtcggcagtcggctccctcgttgaccgaatcaccgacctctctccccagggggtacccagctgtctagagaattctagatcttgagacaaatggcagtattcatccacaattttaaaagaaaaggggggattggggggtacagtgcaggggaaagaatagtagacataatagcaacagacatacaaactaaagaattacaaaaacaaattacaaaaattcaaaattttcgggtttattacagggacagcagagatccactttggcgccggctcgaggggg

SEQ ID NO: 23 - protein, 288 aa, Artificial Sequence
  Synthetic Polypeptide
MIKIATRKYLGKQNVYDIGVERDHNFALKNGFIASNCISRRAQGVTLQDLPETELPAVLQPVAEAMDAIAAADLSQTSGFGPFGPQGIGQYTTWRDFICAIADPHVYHWQTVMDDTVSASVAQALDELMLWAEDCPEVRHLVHADFGSNNVLTDNGRITAVIDWSEAMFGDSQYEVANIFFWRPWLACMEQQTRYFERRHPELAGSPRLRAYMLRIGLDQLYQSLVDGNFDDAAWAQGRCDAIVRSGAGTVGRTQIARRSAAVWTDGCVEVLADSGNRRPSTRPRAKE

SEQ ID NO: 24 - DNA, 9279 bp, Artificial Sequence
  Synthetic Polynucleotide
cccggggttattaatagtaatcaattacggggtcattagttcatagcccatatatggagttccgcgttacataacttacggtaaatggcccgcctggctgaccgcccaacgacccccgcccattgacgtcaataatgacgtatgttcccatagtaacgccaatagggactttccattgacgtcaatgggtggagtatttacggtaaactgcccacttggcagtacatcaagtgtatcatatgccaagtacgccccctattgacgtcaatgacggtaaatggcccgcctggcattatgcccagtacatgaccttatgggactttcctacttggcagtacatctacgtattagtcatcgctattaccatggtgatgcggttttggcagtacatcaatgggcgtggatagcggtttgactcacggggatttccaagtctccaccccattgacgtcaatgggagtttgttttggcaccaaaatcaacgggactttccaaaatgtcgtaacaactccgccccattgacgcaaatgggcggtaggcgtgtacggtgggaggtctatataagcagagctctctggctaactgtcgggatcaacaagtttgtacaaaaaagcaggctccgaattcaccggtgccaccatgaaaaagcctgaactcaccgcgacgtctgtcgagaagtttctgatcgaaaagttcgacagcgtctccgacctgatgcagctctcggagggcgaagaatctcgtgctttcagcttcgatgtaggagggcgtggatatgtcctgcgggtaaatagctgcgccgatggtttctacaaagatcgttatgtttatcggcactttgcatcggccgcgctcccgattccggaagtgcttgacattggggaatttagcgagagcctgacctattgcatctcccgccgtgcacagggtgtcacgttgcaagacctgcctgaaaccgaactgcccgctgttctgcagccggtcgcggaggccatggatgcgatcgctgcggccgatcttagccagacgagcgggttcggcccattcggaccgcaaggaatcggtcaatacactacatggcgtgatttcatatgcgcgattgctgatccccatgtgtatcactggcaaactgtgatggacgacaccgtcagtgcgtccgtcgcgcaggctctcgatgagctgatgctttgggccgaggactgccccgaagtccggcacctcgtgcacgcggatttcggctgtatcagtggcgactccctgatctcactcgcatgattaattaagaattcgacccagctttcttgtacaaagtggttggtaagcctatccctaaccctctcctcggtctcgattctacgtagtaatgagctagcagtctcgaggttaacgaattccgccccccccctaacgttactggccgaagccgcttggaataaggccggtgtgcgcttgtctatatgttattttccaccatattgccgtcttttggcaatgtgagggcccggaaacctggccctgtcttcttgacgagcattcctaggggtctttcccctctcgccaaaggaatgcaaggtctgttgaatgtcgtgaaggaagcagttcctctggaagcttcttgaagacaaacaacgtctgtagcgaccctttgcaggcagcggaaccccccacctggcgacaggtgcccctgcggccaaaagccacgtgtataagatacacctgcaaaggcggcacaaccccagtgccacgttgtgagttggatagttgtggaaagagtcaaatggctctcctcaagcgtattcaacaaggggctgaaggatgcccagaaggtaccccattgtatgggatctgatctggggcctcggtgcacatgctttacatgtgtttagtcgaggttaaaaaaacgtctaggccccccgaaccacggggacgtggttttcctttgaaaaacacgataataccatggccatgagcgagctgattaaggagaacatgcacatgaagctgtacatggagggcaccgtggacaaccatcacttcaagtgcacatccgagggcgaaggcaagccctacgagggcacccagaccatgagaatcaaggtggtcgagggcggccctctccccttcgccttcgacatcctggctactagcttcctctacggcagcaagaccttcatcaaccacacccagggcatccccgacttcttcaagcagtccttccctgagggcttcacatgggagagagtcaccacatacgaagacgggggcgtgctgaccgctacccaggacaccagcctccaggacggctgcctcatctacaacgtcaagatcagaggggtgaacttcacatccaacggccctgtgatgcagaagaaaacactcggctgggaggccttcaccgagacgctgtaccccgctgacggcggcctggaaggcagaaacgacatggccctgaagctcgtgggcgggagccatctgatcgcaaacatcaagaccacatatagatccaagaaacccgctaagaacctcaagatgcctggcgtctactatgtggactacagactggaaagaatcaaggaggccaacaacgagacctacgtcgagcagcacgaggtggcagtggccagatactgcgacctccctagcaaactggggcacaagcttaattaacaccggtggcgcgttaagtcgacaatcaacctctggattacaaaatttgtgaaagattgactggtattcttaactatgttgctccttttacgctatgtggatacgctgctttaatgcctttgtatcatgctattgcttcccgtatggctttcattttctcctccttgtataaatcctggttgctgtctctttatgaggagttgtggcccgttgtcaggcaacgtggcgtggtgtgcactgtgtttgctgacgcaacccccactggttggggcattgccaccacctgtcagctcctttccgggactttcgctttccccctccctattgccacggcggaactcatcgccgcctgccttgcccgctgctggacaggggctcggctgttgggcactgacaattccgtggtgttgtcggggaaatcatcgtcctttccttggctgctcgcctgtgttgccacctggattctgcgcgggacgtccttctgctacgtcccttcggccctcaatccagcggaccttccttcccgcggcctgctgccggctctgcggcctcttccgcgtcttcgccttcgccctcagacgagtcggatctccctttgggccgcctccccgcgtcgactttaagaccaatgacttacaaggcagctgtagatcttagccactttttaaaagaaaaggggggactggaagggctaattcactcccaacgaagacaagatctgctttttgcttgtactgggtctctctggttagaccagatctgagcctgggagctctctggctaactagggaacccactgcttaagcctcaataaagcttgccttgagtgcttcaagtagtgtgtgcccgtctgttgtgtgactctggtaactagagatccctcagacccttttagtcagtgtggaaaatctctagcagtacgtatagtagttcatgtcatcttattattcagtatttataacttgcaaagaaatgaatatcagagagtgagaggaacttgtttattgcagcttataatggttacaaataaagcaatagcatcacaaatttcacaaataaagcatttttttcactgcattctagttgtggtttgtccaaactcatcaatgtatcttatcatgtctggctctagctatcccgcccctaactccgcccatcccgcccctaactccgcccagttccgcccattctccgccccatggctgactaattttttttatttatgcagaggccgaggccgcctcggcctctgagctattccagaagtagtgaggaggcttttttggaggcctagggacgtacccaattcgccctatagtgagtcgtattacgcgcgctcactggccgtcgttttacaacgtcgtgactgggaaaaccctggcgttacccaacttaatcgccttgcagcacatccccctttcgccagctggcgtaatagcgaagaggcccgcaccgatcgcccttcccaacagttgcgcagcctgaatggcgaatgggacgcgccctgtagcggcgcattaagcgcggcgggtgtggtggttacgcgcagcgtgaccgctacacttgccagcgccctagcgcccgctcctttcgctttcttcccttcctttctcgccacgttcgccggctttccccgtcaagctctaaatcgggggctccctttagggttccgatttagtgctttacggcacctcgaccccaaaaaacttgattagggtgatggttcacgtagtgggccatcgccctgatagacggtttttcgccctttgacgttggagtccacgttctttaatagtggactcttgttccaaactggaacaacactcaaccctatctcggtctattcttttgatttataagggattttgccgatttcggcctattggttaaaaaatgagctgatttaacaaaaatttaacgcgaattttaacaaaatattaacgcttacaatttaggtggcacttttcggggaaatgtgcgcggaacccctatttgtttatttttctaaatacattcaaatatgtatccgctcatgagacaataaccctgataaatgcttcaataatattgaaaaaggaagagtatgagtattcaacatttccgtgtcgcccttattcccttttttgcggcattttgccttcctgtttttgctcacccagaaacgctggtgaaagtaaaagatgctgaagatcagttgggtgcacgagtgggttacatcgaactggatctcaacagcggtaagatccttgagagttttcgccccgaagaacgttttccaatgatgagcacttttaaagttctgctatgtggcgcggtattatcccgtattgacgccgggcaagagcaactcggtcgccgcatacactattctcagaatgacttggttgagtactcaccagtcacagaaaagcatcttacggatggcatgacagtaagagaattatgcagtgctgccataaccatgagtgataacactgcggccaacttacttctgacaacgatcggaggaccgaaggagctaaccgcttttttgcacaacatgggggatcatgtaactcgccttgatcgttgggaaccggagctgaatgaagccataccaaacgacgagcgtgacaccacgatgcctgtagcaatggcaacaacgttgcgcaaactattaactggcgaactacttactctagcttcccggcaacaattaatagactggatggaggcggataaagttgcaggaccacttctgcgctcggcccttccggctggctggtttattgctgataaatctggagccggtgagcgtgggtctcgcggtatcattgcagcactggggccagatggtaagccctcccgtatcgtagttatctacacgacggggagtcaggcaactatggatgaacgaaatagacagatcgctgagataggtgcctcactgattaagcattggtaactgtcagaccaagtttactcatatatactttagattgatttaaaacttcatttttaatttaaaaggatctaggtgaagatcctttttgataatctcatgaccaaaatcccttaacgtgagttttcgttccactgagcgtcagaccccgtagaaaagatcaaaggatcttcttgagatcctttttttctgcgcgtaatctgctgcttgcaaacaaaaaaaccaccgctaccagcggtggtttgtttgccggatcaagagctaccaactctttttccgaaggtaactggcttcagcagagcgcagataccaaatactgttcttctagtgtagccgtagttaggccaccacttcaagaactctgtagcaccgcctacatacctcgctctgctaatcctgttaccagtggctgctgccagtggcgataagtcgtgtcttaccgggttggactcaagacgatagttaccggataaggcgcagcggtcgggctgaacggggggttcgtgcacacagcccagcttggagcgaacgacctacaccgaactgagatacctacagcgtgagctatgagaaagcgccacgcttcccgaagggagaaaggcggacaggtatccggtaagcggcagggtcggaacaggagagcgcacgagggagcttccagggggaaacgcctggtatctttatagtcctgtcgggtttcgccacctctgacttgagcgtcgatttttgtgatgctcgtcaggggggcggagcctatggaaaaacgccagcaacgcggcctttttacggttcctggccttttgctggccttttgctcacatgttctttcctgcgttatcccctgattctgtggataaccgtattaccgcctttgagtgagctgataccgctcgccgcagccgaacgaccgagcgcagcgagtcagtgagcgaggaagcggaagagcgcccaatacgcaaaccgcctctccccgcgcgttggccgattcattaatgcagctggcacgacaggtttcccgactggaaagcgggcagtgagcgcaacgcaattaatgtgagttagctcactcattaggcaccccaggctttacactttatgcttccggctcgtatgttgtgtggaattgtgagcggataacaatttcacacaggaaacagctatgaccatgattacgccaagcgcgcaattaaccctcactaaagggaacaaaagctggagctgcaagcttaatgtagtcttatgcaatactcttgtagtcttgcaacatggtaacgatgagttagcaacatgccttacaaggagagaaaaagcaccgtgcatgccgattggtggaagtaaggtggtacgatcgtgccttattaggaaggcaacagacgggtctgacatggattggacgaaccactgaattgccgcattgcagagatattgtatttaagtgcctagctcgatacataaacgggtctctctggttagaccagatctgagcctgggagctctctggctaactagggaacccactgcttaagcctcaataaagcttgccttgagtgcttcaagtagtgtgtgcccgtctgttgtgtgactctggtaactagagatccctcagacccttttagtcagtgtggaaaatctctagcagtggcgcccgaacagggacttgaaagcgaaagggaaaccagaggagctctctcgacgcaggactcggcttgctgaagcgcgcacggcaagaggcgaggggcggcgactggtgagtacgccaaaaattttgactagcggaggctagaaggagagagatgggtgcgagagcgtcagtattaagcgggggagaattagatcgcgatgggaaaaaattcggttaaggccagggggaaagaaaaaatataaattaaaacatatagtatgggcaagcagggagctagaacgattcgcagttaatcctggcctgttagaaacatcagaaggctgtagacaaatactgggacagctacaaccatcccttcagacaggatcagaagaacttagatcattatataatacagtagcaaccctctattgtgtgcatcaaaggatagagataaaagacaccaaggaagctttagacaagatagaggaagagcaaaacaaaagtaagaccaccgcacagcaagcggccgctgatcttcagacctggaggaggagatatgagggacaattggagaagtgaattatataaatataaagtagtaaaaattgaaccattaggagtagcacccaccaaggcaaagagaagagtggtgcagagagaaaaaagagcagtgggaataggagctttgttccttgggttcttgggagcagcaggaagcactatgggcgcagcgtcaatgacgctgacggtacaggccagacaattattgtctggtatagtgcagcagcagaacaatttgctgagggctattgaggcgcaacagcatctgttgcaactcacagtctggggcatcaagcagctccaggcaagaatcctggctgtggaaagatacctaaaggatcaacagctcctggggatttggggttgctctggaaaactcatttgcaccactgctgtgccttggaatgctagttggagtaataaatctctggaacagatttggaatcacacgacctggatggagtgggacagagaaattaacaattacacaagcttaatacactccttaattgaagaatcgcaaaaccagcaagaaaagaatgaacaagaattattggaattagataaatgggcaagtttgtggaattggtttaacataacaaattggctgtggtatataaaattattcataatgatagtaggaggcttggtaggtttaagaatagtttttgctgtactttctatagtgaatagagttaggcagggatattcaccattatcgtttcagacccacctcccaaccccgaggggacccttgcgccttttccaaggcagccctgggtttgcgcagggacgcggctgctctgggcgtggttccgggaaacgcagcggcgccgaccctgggtctcgcacattcttcacgtccgttcgcagcgtcacccggatcttcgccgctacccttgtgggccccccggcgacgcttcctgctccgcccctaagtcgggaaggttccttgcggttcgcggcgtgccggacgtgacaaacggaagccgcacgtctcactagtaccctcgcagacggacagcgccagggagcaatggcagcgcgccgaccgcgatgggctgtggccaatagcggctgctcagcagggcgcgccgagagcagcggccgggaaggggcggtgcgggaggcggggtgtggggcggtagtgtgggccctgttcctgcccgcgcggtgttccgcattctgcaagcctccggagcgcacgtcggcagtcggctccctcgttgaccgaatcaccgacctctctccccagggggtacccagctgtctagagaattctagatcttgagacaaatggcagtattcatccacaattttaaaagaaaaggggggattggggggtacagtgcaggggaaagaatagtagacataatagcaacagacatacaaactaaagaattacaaaaacaaattacaaaaattcaaaattttcgggtttattacagggacagcagagatccactttggcgccggctcgaggggg

SEQ ID NO: 25 - protein, 211 aa, Artificial Sequence
  Synthetic Polypeptide
MKKPELTATSVEKFLIEKFDSVSDLMQLSEGEESRAFSFDVGGRGYVLRVNSCADGFYKDRYVYRHFASAALPIPEVLDIGEFSESLTYCISRRAQGVTLQDLPETELPAVLQPVAEAMDAIAAADLSQTSGFGPFGPQGIGQYTTWRDFICAIADPHVYHWQTVMDDTVSASVAQALDELMLWAEDCPEVRHLVHADFGCISGDSLISLA

SEQ ID NO: 26 - DNA, 9507 bp, Artificial Sequence
  Synthetic Polynucleotide
cccggggttattaatagtaatcaattacggggtcattagttcatagcccatatatggagttccgcgttacataacttacggtaaatggcccgcctggctgaccgcccaacgacccccgcccattgacgtcaataatgacgtatgttcccatagtaacgccaatagggactttccattgacgtcaatgggtggagtatttacggtaaactgcccacttggcagtacatcaagtgtatcatatgccaagtacgccccctattgacgtcaatgacggtaaatggcccgcctggcattatgcccagtacatgaccttatgggactttcctacttggcagtacatctacgtattagtcatcgctattaccatggtgatgcggttttggcagtacatcaatgggcgtggatagcggtttgactcacggggatttccaagtctccaccccattgacgtcaatgggagtttgttttggcaccaaaatcaacgggactttccaaaatgtcgtaacaactccgccccattgacgcaaatgggcggtaggcgtgtacggtgggaggtctatataagcagagctctctggctaactgtcgggatcaacaagtttgtacaaaaaagcaggctccgaattcaccggtgccgccaccatgagcactggaaagcgagttagcatcaaggacttgctggacgaaaaggatttcgaaatttgggcaatcaatgagcagaccatgaaactggagtctgcaaaggtgtcccgggtgttttgcacgggtaagaagcttgtttatatccttaaaactagactgggccggacgatcaaagccaccgcgaaccacagattcttgacaatcgacgggtggaaacggctggacgaactgagcttgaaggagcacatcgcccttcctcggaagctcgagtcatcttccctgcagctgagtcccgaaatcgaaaagctctctcagagcgatatatattgggactccatcgtaagcataacagagacgggggtcgaggaggtgttcgatctgacagttcctgggcctcataatttcgtagcgaacgacatcattgtacataactccaacaatgtcctgacggacaatggccgcataacagcggtcattgactggagcgaggcgatgttcggggattcccaatacgaggtcgccaacatcttcttctggaggccgtggttggcttgtatggagcagcagacgcgctacttcgagcggaggcatccggagcttgcaggatcgccgcggctccgggcgtatatgctccgcattggtcttgaccaactctatcagagcttggttgacggcaatttcgatgatgcagcttgggcgcagggtcgatgcgacgcaatcgtccgatccggagccgggactgtcgggcgtacacaaatcgcccgcagaagcgcggccgtctggaccgatggctgtgtagaagtactcgccgatagtggaaaccgacgccccagcactcgtccgagggcaaaggaatagttaattaagaattcgacccagctttcttgtacaaagtggttggtaagcctatccctaaccctctcctcggtctcgattctacgtagtaatgagctagcagtctcgaggttaacgaattccgccccccccctaacgttactggccgaagccgcttggaataaggccggtgtgcgcttgtctatatgttattttccaccatattgccgtcttttggcaatgtgagggcccggaaacctggccctgtcttcttgacgagcattcctaggggtctttcccctctcgccaaaggaatgcaaggtctgttgaatgtcgtgaaggaagcagttcctctggaagcttcttgaagacaaacaacgtctgtagcgaccctttgcaggcagcggaaccccccacctggcgacaggtgcccctgcggccaaaagccacgtgtataagatacacctgcaaaggcggcacaaccccagtgccacgttgtgagttggatagttgtggaaagagtcaaatggctctcctcaagcgtattcaacaaggggctgaaggatgcccagaaggtaccccattgtatgggatctgatctggggcctcggtgcacatgctttacatgtgtttagtcgaggttaaaaaaacgtctaggccccccgaaccacggggacgtggttttcctttgaaaaacacgataataccatggtgagcaagggcgaggaggataacatggccatcatcaaggagttcatgcgcttcaaggtgcacatggagggctccgtgaacggccacgagttcgagatcgagggcgagggcgagggccgcccctacgagggcacccagaccgccaagctgaaggtgaccaagggtggccccctgcccttcgcctgggacatcctgtcccctcagttcatgtacggctccaaggcctacgtgaagcaccccgccgacatccccgactacttgaagctgtccttccccgagggcttcaagtgggagcgcgtgatgaacttcgaggacggcggcgtggtgaccgtgacccaggactcctccctgcaggacggcgagttcatctacaaggtgaagctgcgcggcaccaacttcccctccgacggccccgtaatgcagaagaagaccatgggctgggaggcctcctccgagcggatgtaccccgaggacggcgccctgaagggcgagatcaagcagaggctgaagctgaaggacggcggccactacgacgctgaggtcaagaccacctacaaggccaagaagcccgtgcagctgcccggcgcctacaacgtcaacatcaagttggacatcacctcccacaacgaggactacaccatcgtggaacagtacgaacgcgccgagggccgccactccaccggcggcatggacgagctgtacaagtaacaccggtggcgcgttaagtcgacaatcaacctctggattacaaaatttgtgaaagattgactggtattcttaactatgttgctccttttacgctatgtggatacgctgctttaatgcctttgtatcatgctattgcttcccgtatggctttcattttctcctccttgtataaatcctggttgctgtctctttatgaggagttgtggcccgttgtcaggcaacgtggcgtggtgtgcactgtgtttgctgacgcaacccccactggttggggcattgccaccacctgtcagctcctttccgggactttcgctttccccctccctattgccacggcggaactcatcgccgcctgccttgcccgctgctggacaggggctcggctgttgggcactgacaattccgtggtgttgtcggggaaatcatcgtcctttccttggctgctcgcctgtgttgccacctggattctgcgcgggacgtccttctgctacgtcccttcggccctcaatccagcggaccttccttcccgcggcctgctgccggctctgcggcctcttccgcgtcttcgccttcgccctcagacgagtcggatctccctttgggccgcctccccgcgtcgactttaagaccaatgacttacaaggcagctgtagatcttagccactttttaaaagaaaaggggggactggaagggctaattcactcccaacgaagacaagatctgctttttgcttgtactgggtctctctggttagaccagatctgagcctgggagctctctggctaactagggaacccactgcttaagcctcaataaagcttgccttgagtgcttcaagtagtgtgtgcccgtctgttgtgtgactctggtaactagagatccctcagacccttttagtcagtgtggaaaatctctagcagtacgtatagtagttcatgtcatcttattattcagtatttataacttgcaaagaaatgaatatcagagagtgagaggaacttgtttattgcagcttataatggttacaaataaagcaatagcatcacaaatttcacaaataaagcatttttttcactgcattctagttgtggtttgtccaaactcatcaatgtatcttatcatgtctggctctagctatcccgcccctaactccgcccatcccgcccctaactccgcccagttccgcccattctccgccccatggctgactaattttttttatttatgcagaggccgaggccgcctcggcctctgagctattccagaagtagtgaggaggcttttttggaggcctagggacgtacccaattcgccctatagtgagtcgtattacgcgcgctcactggccgtcgttttacaacgtcgtgactgggaaaaccctggcgttacccaacttaatcgccttgcagcacatccccctttcgccagctggcgtaatagcgaagaggcccgcaccgatcgcccttcccaacagttgcgcagcctgaatggcgaatgggacgcgccctgtagcggcgcattaagcgcggcgggtgtggtggttacgcgcagcgtgaccgctacacttgccagcgccctagcgcccgctcctttcgctttcttcccttcctttctcgccacgttcgccggctttccccgtcaagctctaaatcgggggctccctttagggttccgatttagtgctttacggcacctcgaccccaaaaaacttgattagggtgatggttcacgtagtgggccatcgccctgatagacggtttttcgccctttgacgttggagtccacgttctttaatagtggactcttgttccaaactggaacaacactcaaccctatctcggtctattcttttgatttataagggattttgccgatttcggcctattggttaaaaaatgagctgatttaacaaaaatttaacgcgaattttaacaaaatattaacgcttacaatttaggtggcacttttcggggaaatgtgcgcggaacccctatttgtttatttttctaaatacattcaaatatgtatccgctcatgagacaataaccctgataaatgcttcaataatattgaaaaaggaagagtatgagtattcaacatttccgtgtcgcccttattcccttttttgcggcattttgccttcctgtttttgctcacccagaaacgctggtgaaagtaaaagatgctgaagatcagttgggtgcacgagtgggttacatcgaactggatctcaacagcggtaagatccttgagagttttcgccccgaagaacgttttccaatgatgagcacttttaaagttctgctatgtggcgcggtattatcccgtattgacgccgggcaagagcaactcggtcgccgcatacactattctcagaatgacttggttgagtactcaccagtcacagaaaagcatcttacggatggcatgacagtaagagaattatgcagtgctgccataaccatgagtgataacactgcggccaacttacttctgacaacgatcggaggaccgaaggagctaaccgcttttttgcacaacatgggggatcatgtaactcgccttgatcgttgggaaccggagctgaatgaagccataccaaacgacgagcgtgacaccacgatgcctgtagcaatggcaacaacgttgcgcaaactattaactggcgaactacttactctagcttcccggcaacaattaatagactggatggaggcggataaagttgcaggaccacttctgcgctcggcccttccggctggctggtttattgctgataaatctggagccggtgagcgtgggtctcgcggtatcattgcagcactggggccagatggtaagccctcccgtatcgtagttatctacacgacggggagtcaggcaactatggatgaacgaaatagacagatcgctgagataggtgcctcactgattaagcattggtaactgtcagaccaagtttactcatatatactttagattgatttaaaacttcatttttaatttaaaaggatctaggtgaagatcctttttgataatctcatgaccaaaatcccttaacgtgagttttcgttccactgagcgtcagaccccgtagaaaagatcaaaggatcttcttgagatcctttttttctgcgcgtaatctgctgcttgcaaacaaaaaaaccaccgctaccagcggtggtttgtttgccggatcaagagctaccaactctttttccgaaggtaactggcttcagcagagcgcagataccaaatactgttcttctagtgtagccgtagttaggccaccacttcaagaactctgtagcaccgcctacatacctcgctctgctaatcctgttaccagtggctgctgccagtggcgataagtcgtgtcttaccgggttggactcaagacgatagttaccggataaggcgcagcggtcgggctgaacggggggttcgtgcacacagcccagcttggagcgaacgacctacaccgaactgagatacctacagcgtgagctatgagaaagcgccacgcttcccgaagggagaaaggcggacaggtatccggtaagcggcagggtcggaacaggagagcgcacgagggagcttccagggggaaacgcctggtatctttatagtcctgtcgggtttcgccacctctgacttgagcgtcgatttttgtgatgctcgtcaggggggcggagcctatggaaaaacgccagcaacgcggcctttttacggttcctggccttttgctggccttttgctcacatgttctttcctgcgttatcccctgattctgtggataaccgtattaccgcctttgagtgagctgataccgctcgccgcagccgaacgaccgagcgcagcgagtcagtgagcgaggaagcggaagagcgcccaatacgcaaaccgcctctccccgcgcgttggccgattcattaatgcagctggcacgacaggtttcccgactggaaagcgggcagtgagcgcaacgcaattaatgtgagttagctcactcattaggcaccccaggctttacactttatgcttccggctcgtatgttgtgtggaattgtgagcggataacaatttcacacaggaaacagctatgaccatgattacgccaagcgcgcaattaaccctcactaaagggaacaaaagctggagctgcaagcttaatgtagtcttatgcaatactcttgtagtcttgcaacatggtaacgatgagttagcaacatgccttacaaggagagaaaaagcaccgtgcatgccgattggtggaagtaaggtggtacgatcgtgccttattaggaaggcaacagacgggtctgacatggattggacgaaccactgaattgccgcattgcagagatattgtatttaagtgcctagctcgatacataaacgggtctctctggttagaccagatctgagcctgggagctctctggctaactagggaacccactgcttaagcctcaataaagcttgccttgagtgcttcaagtagtgtgtgcccgtctgttgtgtgactctggtaactagagatccctcagacccttttagtcagtgtggaaaatctctagcagtggcgcccgaacagggacttgaaagcgaaagggaaaccagaggagctctctcgacgcaggactcggcttgctgaagcgcgcacggcaagaggcgaggggcggcgactggtgagtacgccaaaaattttgactagcggaggctagaaggagagagatgggtgcgagagcgtcagtattaagcgggggagaattagatcgcgatgggaaaaaattcggttaaggccagggggaaagaaaaaatataaattaaaacatatagtatgggcaagcagggagctagaacgattcgcagttaatcctggcctgttagaaacatcagaaggctgtagacaaatactgggacagctacaaccatcccttcagacaggatcagaagaacttagatcattatataatacagtagcaaccctctattgtgtgcatcaaaggatagagataaaagacaccaaggaagctttagacaagatagaggaagagcaaaacaaaagtaagaccaccgcacagcaagcggccgctgatcttcagacctggaggaggagatatgagggacaattggagaagtgaattatataaatataaagtagtaaaaattgaaccattaggagtagcacccaccaaggcaaagagaagagtggtgcagagagaaaaaagagcagtgggaataggagctttgttccttgggttcttgggagcagcaggaagcactatgggcgcagcgtcaatgacgctgacggtacaggccagacaattattgtctggtatagtgcagcagcagaacaatttgctgagggctattgaggcgcaacagcatctgttgcaactcacagtctggggcatcaagcagctccaggcaagaatcctggctgtggaaagatacctaaaggatcaacagctcctggggatttggggttgctctggaaaactcatttgcaccactgctgtgccttggaatgctagttggagtaataaatctctggaacagatttggaatcacacgacctggatggagtgggacagagaaattaacaattacacaagcttaatacactccttaattgaagaatcgcaaaaccagcaagaaaagaatgaacaagaattattggaattagataaatgggcaagtttgtggaattggtttaacataacaaattggctgtggtatataaaattattcataatgatagtaggaggcttggtaggtttaagaatagtttttgctgtactttctatagtgaatagagttaggcagggatattcaccattatcgtttcagacccacctcccaaccccgaggggacccttgcgccttttccaaggcagccctgggtttgcgcagggacgcggctgctctgggcgtggttccgggaaacgcagcggcgccgaccctgggtctcgcacattcttcacgtccgttcgcagcgtcacccggatcttcgccgctacccttgtgggccccccggcgacgcttcctgctccgcccctaagtcgggaaggttccttgcggttcgcggcgtgccggacgtgacaaacggaagccgcacgtctcactagtaccctcgcagacggacagcgccagggagcaatggcagcgcgccgaccgcgatgggctgtggccaatagcggctgctcagcagggcgcgccgagagcagcggccgggaaggggcggtgcgggaggcggggtgtggggcggtagtgtgggccctgttcctgcccgcgcggtgttccgcattctgcaagcctccggagcgcacgtcggcagtcggctccctcgttgaccgaatcaccgacctctctccccagggggtacccagctgtctagagaattctagatcttgagacaaatggcagtattcatccacaattttaaaagaaaaggggggattggggggtacagtgcaggggaaagaatagtagacataatagcaacagacatacaaactaaagaattacaaaaacaaattacaaaaattcaaaattttcgggtttattacagggacagcagagatccactttggcgccggctcgaggggg

SEQ ID NO: 27 - protein, 285 aa, Artificial Sequence
  Synthetic Polypeptide
MSTGKRVSIKDLLDEKDFEIWAINEQTMKLESAKVSRVFCTGKKLVYILKTRLGRTIKATANHRFLTIDGWKRLDELSLKEHIALPRKLESSSLQLSPEIEKLSQSDIYWDSIVSITETGVEEVFDLTVPGPHNFVANDIIVHNSNNVLTDNGRITAVIDWSEAMFGDSQYEVANIFFWRPWLACMEQQTRYFERRHPELAGSPRLRAYMLRIGLDQLYQSLVDGNFDDAAWAQGRCDAIVRSGAGTVGRTQIARRSAAVWTDGCVEVLADSGNRRPSTRPRAKE

SEQ ID NO: 28 - DNA, 9108 bp, Artificial Sequence
  Synthetic Polynucleotide
cccggggttattaatagtaatcaattacggggtcattagttcatagcccatatatggagttccgcgttacataacttacggtaaatggcccgcctggctgaccgcccaacgacccccgcccattgacgtcaataatgacgtatgttcccatagtaacgccaatagggactttccattgacgtcaatgggtggagtatttacggtaaactgcccacttggcagtacatcaagtgtatcatatgccaagtacgccccctattgacgtcaatgacggtaaatggcccgcctggcattatgcccagtacatgaccttatgggactttcctacttggcagtacatctacgtattagtcatcgctattaccatggtgatgcggttttggcagtacatcaatgggcgtggatagcggtttgactcacggggatttccaagtctccaccccattgacgtcaatgggagtttgttttggcaccaaaatcaacgggactttccaaaatgtcgtaacaactccgccccattgacgcaaatgggcggtaggcgtgtacggtgggaggtctatataagcagagctctctggctaactgtcgggatcaacaagtttgtacaaaaaagcaggctccgaattcaccggtgccaccatgaaaaagcctgaactcaccgcgacgtctgtcgagaagtttctgatcgaaaagttcgacagcgtctccgacctgatgcagctctcggagggcgaagaatctcgtgctttcagcttcgatgtaggagggcgtggatatgtcctgcgggtaaatagctgcctttcatacgagaccgagatcctgactgtcgagtacggattgcttcctatcggcaaaatcgtggagaagaggattgaatgtaccgtctattcagtcgataataatgggaacatctacacacagcccgtggctcaatggcacgacagaggagagcaggaagtttttgaatactgtctcgaggacggatccctcatccgcgctactaaagatcataagtttatgaccgtggacggccagatgctgccaattgacgaaatttttgaacgagagctggatctgatgagagtcgacaaccttccaaactgattaattaagaattcgacccagctttcttgtacaaagtggttggtaagcctatccctaaccctctcctcggtctcgattctacgtagtaatgagctagcagtctcgaggttaacgaattccgccccccccctaacgttactggccgaagccgcttggaataaggccggtgtgcgcttgtctatatgttattttccaccatattgccgtcttttggcaatgtgagggcccggaaacctggccctgtcttcttgacgagcattcctaggggtctttcccctctcgccaaaggaatgcaaggtctgttgaatgtcgtgaaggaagcagttcctctggaagcttcttgaagacaaacaacgtctgtagcgaccctttgcaggcagcggaaccccccacctggcgacaggtgcccctgcggccaaaagccacgtgtataagatacacctgcaaaggcggcacaaccccagtgccacgttgtgagttggatagttgtggaaagagtcaaatggctctcctcaagcgtattcaacaaggggctgaaggatgcccagaaggtaccccattgtatgggatctgatctggggcctcggtgcacatgctttacatgtgtttagtcgaggttaaaaaaacgtctaggccccccgaaccacggggacgtggttttcctttgaaaaacacgataataccatggccatgagcgagctgattaaggagaacatgcacatgaagctgtacatggagggcaccgtggacaaccatcacttcaagtgcacatccgagggcgaaggcaagccctacgagggcacccagaccatgagaatcaaggtggtcgagggcggccctctccccttcgccttcgacatcctggctactagcttcctctacggcagcaagaccttcatcaaccacacccagggcatccccgacttcttcaagcagtccttccctgagggcttcacatgggagagagtcaccacatacgaagacgggggcgtgctgaccgctacccaggacaccagcctccaggacggctgcctcatctacaacgtcaagatcagaggggtgaacttcacatccaacggccctgtgatgcagaagaaaacactcggctgggaggccttcaccgagacgctgtaccccgctgacggcggcctggaaggcagaaacgacatggccctgaagctcgtgggcgggagccatctgatcgcaaacatcaagaccacatatagatccaagaaacccgctaagaacctcaagatgcctggcgtctactatgtggactacagactggaaagaatcaaggaggccaacaacgagacctacgtcgagcagcacgaggtggcagtggccagatactgcgacctccctagcaaactggggcacaagcttaattaacaccggtggcgcgttaagtcgacaatcaacctctggattacaaaatttgtgaaagattgactggtattcttaactatgttgctccttttacgctatgtggatacgctgctttaatgcctttgtatcatgctattgcttcccgtatggctttcattttctcctccttgtataaatcctggttgctgtctctttatgaggagttgtggcccgttgtcaggcaacgtggcgtggtgtgcactgtgtttgctgacgcaacccccactggttggggcattgccaccacctgtcagctcctttccgggactttcgctttccccctccctattgccacggcggaactcatcgccgcctgccttgcccgctgctggacaggggctcggctgttgggcactgacaattccgtggtgttgtcggggaaatcatcgtcctttccttggctgctcgcctgtgttgccacctggattctgcgcgggacgtccttctgctacgtcccttcggccctcaatccagcggaccttccttcccgcggcctgctgccggctctgcggcctcttccgcgtcttcgccttcgccctcagacgagtcggatctccctttgggccgcctccccgcgtcgactttaagaccaatgacttacaaggcagctgtagatcttagccactttttaaaagaaaaggggggactggaagggctaattcactcccaacgaagacaagatctgctttttgcttgtactgggtctctctggttagaccagatctgagcctgggagctctctggctaactagggaacccactgcttaagcctcaataaagcttgccttgagtgcttcaagtagtgtgtgcccgtctgttgtgtgactctggtaactagagatccctcagacccttttagtcagtgtggaaaatctctagcagtacgtatagtagttcatgtcatcttattattcagtatttataacttgcaaagaaatgaatatcagagagtgagaggaacttgtttattgcagcttataatggttacaaataaagcaatagcatcacaaatttcacaaataaagcatttttttcactgcattctagttgtggtttgtccaaactcatcaatgtatcttatcatgtctggctctagctatcccgcccctaactccgcccatcccgcccctaactccgcccagttccgcccattctccgccccatggctgactaattttttttatttatgcagaggccgaggccgcctcggcctctgagctattccagaagtagtgaggaggcttttttggaggcctagggacgtacccaattcgccctatagtgagtcgtattacgcgcgctcactggccgtcgttttacaacgtcgtgactgggaaaaccctggcgttacccaacttaatcgccttgcagcacatccccctttcgccagctggcgtaatagcgaagaggcccgcaccgatcgcccttcccaacagttgcgcagcctgaatggcgaatgggacgcgccctgtagcggcgcattaagcgcggcgggtgtggtggttacgcgcagcgtgaccgctacacttgccagcgccctagcgcccgctcctttcgctttcttcccttcctttctcgccacgttcgccggctttccccgtcaagctctaaatcgggggctccctttagggttccgatttagtgctttacggcacctcgaccccaaaaaacttgattagggtgatggttcacgtagtgggccatcgccctgatagacggtttttcgccctttgacgttggagtccacgttctttaatagtggactcttgttccaaactggaacaacactcaaccctatctcggtctattcttttgatttataagggattttgccgatttcggcctattggttaaaaaatgagctgatttaacaaaaatttaacgcgaattttaacaaaatattaacgcttacaatttaggtggcacttttcggggaaatgtgcgcggaacccctatttgtttatttttctaaatacattcaaatatgtatccgctcatgagacaataaccctgataaatgcttcaataatattgaaaaaggaagagtatgagtattcaacatttccgtgtcgcccttattcccttttttgcggcattttgccttcctgtttttgctcacccagaaacgctggtgaaagtaaaagatgctgaagatcagttgggtgcacgagtgggttacatcgaactggatctcaacagcggtaagatccttgagagttttcgccccgaagaacgttttccaatgatgagcacttttaaagttctgctatgtggcgcggtattatcccgtattgacgccgggcaagagcaactcggtcgccgcatacactattctcagaatgacttggttgagtactcaccagtcacagaaaagcatcttacggatggcatgacagtaagagaattatgcagtgctgccataaccatgagtgataacactgcggccaacttacttctgacaacgatcggaggaccgaaggagctaaccgcttttttgcacaacatgggggatcatgtaactcgccttgatcgttgggaaccggagctgaatgaagccataccaaacgacgagcgtgacaccacgatgcctgtagcaatggcaacaacgttgcgcaaactattaactggcgaactacttactctagcttcccggcaacaattaatagactggatggaggcggataaagttgcaggaccacttctgcgctcggcccttccggctggctggtttattgctgataaatctggagccggtgagcgtgggtctcgcggtatcattgcagcactggggccagatggtaagccctcccgtatcgtagttatctacacgacggggagtcaggcaactatggatgaacgaaatagacagatcgctgagataggtgcctcactgattaagcattggtaactgtcagaccaagtttactcatatatactttagattgatttaaaacttcatttttaatttaaaaggatctaggtgaagatcctttttgataatctcatgaccaaaatcccttaacgtgagttttcgttccactgagcgtcagaccccgtagaaaagatcaaaggatcttcttgagatcctttttttctgcgcgtaatctgctgcttgcaaacaaaaaaaccaccgctaccagcggtggtttgtttgccggatcaagagctaccaactctttttccgaaggtaactggcttcagcagagcgcagataccaaatactgttcttctagtgtagccgtagttaggccaccacttcaagaactctgtagcaccgcctacatacctcgctctgctaatcctgttaccagtggctgctgccagtggcgataagtcgtgtcttaccgggttggactcaagacgatagttaccggataaggcgcagcggtcgggctgaacggggggttcgtgcacacagcccagcttggagcgaacgacctacaccgaactgagatacctacagcgtgagctatgagaaagcgccacgcttcccgaagggagaaaggcggacaggtatccggtaagcggcagggtcggaacaggagagcgcacgagggagcttccagggggaaacgcctggtatctttatagtcctgtcgggtttcgccacctctgacttgagcgtcgatttttgtgatgctcgtcaggggggcggagcctatggaaaaacgccagcaacgcggcctttttacggttcctggccttttgctggccttttgctcacatgttctttcctgcgttatcccctgattctgtggataaccgtattaccgcctttgagtgagctgataccgctcgccgcagccgaacgaccgagcgcagcgagtcagtgagcgaggaagcggaagagcgcccaatacgcaaaccgcctctccccgcgcgttggccgattcattaatgcagctggcacgacaggtttcccgactggaaagcgggcagtgagcgcaacgcaattaatgtgagttagctcactcattaggcaccccaggctttacactttatgcttccggctcgtatgttgtgtggaattgtgagcggataacaatttcacacaggaaacagctatgaccatgattacgccaagcgcgcaattaaccctcactaaagggaacaaaagctggagctgcaagcttaatgtagtcttatgcaatactcttgtagtcttgcaacatggtaacgatgagttagcaacatgccttacaaggagagaaaaagcaccgtgcatgccgattggtggaagtaaggtggtacgatcgtgccttattaggaaggcaacagacgggtctgacatggattggacgaaccactgaattgccgcattgcagagatattgtatttaagtgcctagctcgatacataaacgggtctctctggttagaccagatctgagcctgggagctctctggctaactagggaacccactgcttaagcctcaataaagcttgccttgagtgcttcaagtagtgtgtgcccgtctgttgtgtgactctggtaactagagatccctcagacccttttagtcagtgtggaaaatctctagcagtggcgcccgaacagggacttgaaagcgaaagggaaaccagaggagctctctcgacgcaggactcggcttgctgaagcgcgcacggcaagaggcgaggggcggcgactggtgagtacgccaaaaattttgactagcggaggctagaaggagagagatgggtgcgagagcgtcagtattaagcgggggagaattagatcgcgatgggaaaaaattcggttaaggccagggggaaagaaaaaatataaattaaaacatatagtatgggcaagcagggagctagaacgattcgcagttaatcctggcctgttagaaacatcagaaggctgtagacaaatactgggacagctacaaccatcccttcagacaggatcagaagaacttagatcattatataatacagtagcaaccctctattgtgtgcatcaaaggatagagataaaagacaccaaggaagctttagacaagatagaggaagagcaaaacaaaagtaagaccaccgcacagcaagcggccgctgatcttcagacctggaggaggagatatgagggacaattggagaagtgaattatataaatataaagtagtaaaaattgaaccattaggagtagcacccaccaaggcaaagagaagagtggtgcagagagaaaaaagagcagtgggaataggagctttgttccttgggttcttgggagcagcaggaagcactatgggcgcagcgtcaatgacgctgacggtacaggccagacaattattgtctggtatagtgcagcagcagaacaatttgctgagggctattgaggcgcaacagcatctgttgcaactcacagtctggggcatcaagcagctccaggcaagaatcctggctgtggaaagatacctaaaggatcaacagctcctggggatttggggttgctctggaaaactcatttgcaccactgctgtgccttggaatgctagttggagtaataaatctctggaacagatttggaatcacacgacctggatggagtgggacagagaaattaacaattacacaagcttaatacactccttaattgaagaatcgcaaaaccagcaagaaaagaatgaacaagaattattggaattagataaatgggcaagtttgtggaattggtttaacataacaaattggctgtggtatataaaattattcataatgatagtaggaggcttggtaggtttaagaatagtttttgctgtactttctatagtgaatagagttaggcagggatattcaccattatcgtttcagacccacctcccaaccccgaggggacccttgcgccttttccaaggcagccctgggtttgcgcagggacgcggctgctctgggcgtggttccgggaaacgcagcggcgccgaccctgggtctcgcacattcttcacgtccgttcgcagcgtcacccggatcttcgccgctacccttgtgggccccccggcgacgcttcctgctccgcccctaagtcgggaaggttccttgcggttcgcggcgtgccggacgtgacaaacggaagccgcacgtctcactagtaccctcgcagacggacagcgccagggagcaatggcagcgcgccgaccgcgatgggctgtggccaatagcggctgctcagcagggcgcgccgagagcagcggccgggaaggggcggtgcgggaggcggggtgtggggcggtagtgtgggccctgttcctgcccgcgcggtgttccgcattctgcaagcctccggagcgcacgtcggcagtcggctccctcgttgaccgaatcaccgacctctctccccagggggtacccagctgtctagagaattctagatcttgagacaaatggcagtattcatccacaattttaaaagaaaaggggggattggggggtacagtgcaggggaaagaatagtagacataatagcaacagacatacaaactaaagaattacaaaaacaaattacaaaaattcaaaattttcgggtttattacagggacagcagagatccactttggcgccggctcgaggggg

SEQ ID NO: 29 - protein, 154 aa, Artificial Sequence
  Synthetic Polypeptide
MKKPELTATSVEKFLIEKFDSVSDLMQLSEGEESRAFSFDVGGRGYVLRVNSCLSYETEILTVEYGLLPIGKIVEKRIECTVYSVDNNGNIYTQPVAQWHDRGEQEVFEYCLEDGSLIRATKDHKFMTVDGQMLPIDEIFERELDLMRVDNLPN

SEQ ID NO: 30 - DNA, 9627 bp, Artificial Sequence
  Synthetic Polynucleotide
cccggggttattaatagtaatcaattacggggtcattagttcatagcccatatatggagttccgcgttacataacttacggtaaatggcccgcctggctgaccgcccaacgacccccgcccattgacgtcaataatgacgtatgttcccatagtaacgccaatagggactttccattgacgtcaatgggtggagtatttacggtaaactgcccacttggcagtacatcaagtgtatcatatgccaagtacgccccctattgacgtcaatgacggtaaatggcccgcctggcattatgcccagtacatgaccttatgggactttcctacttggcagtacatctacgtattagtcatcgctattaccatggtgatgcggttttggcagtacatcaatgggcgtggatagcggtttgactcacggggatttccaagtctccaccccattgacgtcaatgggagtttgttttggcaccaaaatcaacgggactttccaaaatgtcgtaacaactccgccccattgacgcaaatgggcggtaggcgtgtacggtgggaggtctatataagcagagctctctggctaactgtcgggatcaacaagtttgtacaaaaaagcaggctccgaattcaccggtgccgccaccatgattaagatcgctacgcggaagtacctggggaaacagaacgtctacgacataggtgtggagcgcgatcacaactttgctctgaaaaatggatttatcgccagcaactgcgccgatggtttctacaaagatcgttatgtttatcggcactttgcatcggccgcgctcccgattccggaagtgcttgacattggggaatttagcgagagcctgacctattgcatctcccgccgtgcacagggtgtcacgttgcaagacctgcctgaaaccgaactgcccgctgttctgcagccggtcgcggaggccatggatgcgatcgctgcggccgatcttagccagacgagcgggttcggcccattcggaccacaaggaatcggtcaatacactacatggcgtgatttcatatgcgcgattgctgatccccatgtgtatcactggcaaactgtgatggacgacaccgtcagtgcgtccgtcgcgcaggctctcgatgagctgatgctttgggccgaggactgccccgaagtccggcacctcgtgcacgcggatttcggctccaacaatgtcctgacggacaatggccgcataacagcggtcattgactggagcgaggcgatgttcggggattcccaatacgaggtcgccaacatcttcttctggaggccgtggttggcttgtatggagcagcagacgcgctacttcgagcggaggcatccggagcttgcaggatcgccgcggctccgggcgtatatgctccgcattggtcttgaccaactctatcagagcttggttgacggcaatttcgatgatgcagcttgggcgcagggtcgatgcgacgcaatcgtccgatccggagccgggactgtcgggcgtacacaaatcgcccgcagaagcgcggccgtctggaccgatggctgtgtagaagtactcgccgatagtggaaaccgacgccccagcactcgtccgagggcaaaggaatagttaattaagaattcgacccagctttcttgtacaaagtggttggtaagcctatccctaaccctctcctcggtctcgattctacgtagtaatgagctagcagtctcgaggttaacgaattccgccccccccctaacgttactggccgaagccgcttggaataaggccggtgtgcgcttgtctatatgttattttccaccatattgccgtcttttggcaatgtgagggcccggaaacctggccctgtcttcttgacgagcattcctaggggtctttcccctctcgccaaaggaatgcaaggtctgttgaatgtcgtgaaggaagcagttcctctggaagcttcttgaagacaaacaacgtctgtagcgaccctttgcaggcagcggaaccccccacctggcgacaggtgcccctgcggccaaaagccacgtgtataagatacacctgcaaaggcggcacaaccccagtgccacgttgtgagttggatagttgtggaaagagtcaaatggctctcctcaagcgtattcaacaaggggctgaaggatgcccagaaggtaccccattgtatgggatctgatctggggcctcggtgcacatgctttacatgtgtttagtcgaggttaaaaaaacgtctaggccccccgaaccacggggacgtggttttcctttgaaaaacacgataataccatggtgagcaagggcgaggaggataacatggccatcatcaaggagttcatgcgcttcaaggtgcacatggagggctccgtgaacggccacgagttcgagatcgagggcgagggcgagggccgcccctacgagggcacccagaccgccaagctgaaggtgaccaagggtggccccctgcccttcgcctgggacatcctgtcccctcagttcatgtacggctccaaggcctacgtgaagcaccccgccgacatccccgactacttgaagctgtccttccccgagggcttcaagtgggagcgcgtgatgaacttcgaggacggcggcgtggtgaccgtgacccaggactcctccctgcaggacggcgagttcatctacaaggtgaagctgcgcggcaccaacttcccctccgacggccccgtaatgcagaagaagaccatgggctgggaggcctcctccgagcggatgtaccccgaggacggcgccctgaagggcgagatcaagcagaggctgaagctgaaggacggcggccactacgacgctgaggtcaagaccacctacaaggccaagaagcccgtgcagctgcccggcgcctacaacgtcaacatcaagttggacatcacctcccacaacgaggactacaccatcgtggaacagtacgaacgcgccgagggccgccactccaccggcggcatggacgagctgtacaagtaacaccggtggcgcgttaagtcgacaatcaacctctggattacaaaatttgtgaaagattgactggtattcttaactatgttgctccttttacgctatgtggatacgctgctttaatgcctttgtatcatgctattgcttcccgtatggctttcattttctcctccttgtataaatcctggttgctgtctctttatgaggagttgtggcccgttgtcaggcaacgtggcgtggtgtgcactgtgtttgctgacgcaacccccactggttggggcattgccaccacctgtcagctcctttccgggactttcgctttccccctccctattgccacggcggaactcatcgccgcctgccttgcccgctgctggacaggggctcggctgttgggcactgacaattccgtggtgttgtcggggaaatcatcgtcctttccttggctgctcgcctgtgttgccacctggattctgcgcgggacgtccttctgctacgtcccttcggccctcaatccagcggaccttccttcccgcggcctgctgccggctctgcggcctcttccgcgtcttcgccttcgccctcagacgagtcggatctccctttgggccgcctccccgcgtcgactttaagaccaatgacttacaaggcagctgtagatcttagccactttttaaaagaaaaggggggactggaagggctaattcactcccaacgaagacaagatctgctttttgcttgtactgggtctctctggttagaccagatctgagcctgggagctctctggctaactagggaacccactgcttaagcctcaataaagcttgccttgagtgcttcaagtagtgtgtgcccgtctgttgtgtgactctggtaactagagatccctcagacccttttagtcagtgtggaaaatctctagcagtacgtatagtagttcatgtcatcttattattcagtatttataacttgcaaagaaatgaatatcagagagtgagaggaacttgtttattgcagcttataatggttacaaataaagcaatagcatcacaaatttcacaaataaagcatttttttcactgcattctagttgtggtttgtccaaactcatcaatgtatcttatcatgtctggctctagctatcccgcccctaactccgcccatcccgcccctaactccgcccagttccgcccattctccgccccatggctgactaattttttttatttatgcagaggccgaggccgcctcggcctctgagctattccagaagtagtgaggaggcttttttggaggcctagggacgtacccaattcgccctatagtgagtcgtattacgcgcgctcactggccgtcgttttacaacgtcgtgactgggaaaaccctggcgttacccaacttaatcgccttgcagcacatccccctttcgccagctggcgtaatagcgaagaggcccgcaccgatcgcccttcccaacagttgcgcagcctgaatggcgaatgggacgcgccctgtagcggcgcattaagcgcggcgggtgtggtggttacgcgcagcgtgaccgctacacttgccagcgccctagcgcccgctcctttcgctttcttcccttcctttctcgccacgttcgccggctttccccgtcaagctctaaatcgggggctccctttagggttccgatttagtgctttacggcacctcgaccccaaaaaacttgattagggtgatggttcacgtagtgggccatcgccctgatagacggtttttcgccctttgacgttggagtccacgttctttaatagtggactcttgttccaaactggaacaacactcaaccctatctcggtctattcttttgatttataagggattttgccgatttcggcctattggttaaaaaatgagctgatttaacaaaaatttaacgcgaattttaacaaaatattaacgcttacaatttaggtggcacttttcggggaaatgtgcgcggaacccctatttgtttatttttctaaatacattcaaatatgtatccgctcatgagacaataaccctgataaatgcttcaataatattgaaaaaggaagagtatgagtattcaacatttccgtgtcgcccttattcccttttttgcggcattttgccttcctgtttttgctcacccagaaacgctggtgaaagtaaaagatgctgaagatcagttgggtgcacgagtgggttacatcgaactggatctcaacagcggtaagatccttgagagttttcgccccgaagaacgttttccaatgatgagcacttttaaagttctgctatgtggcgcggtattatcccgtattgacgccgggcaagagcaactcggtcgccgcatacactattctcagaatgacttggttgagtactcaccagtcacagaaaagcatcttacggatggcatgacagtaagagaattatgcagtgctgccataaccatgagtgataacactgcggccaacttacttctgacaacgatcggaggaccgaaggagctaaccgcttttttgcacaacatgggggatcatgtaactcgccttgatcgttgggaaccggagctgaatgaagccataccaaacgacgagcgtgacaccacgatgcctgtagcaatggcaacaacgttgcgcaaactattaactggcgaactacttactctagcttcccggcaacaattaatagactggatggaggcggataaagttgcaggaccacttctgcgctcggcccttccggctggctggtttattgctgataaatctggagccggtgagcgtgggtctcgcggtatcattgcagcactggggccagatggtaagccctcccgtatcgtagttatctacacgacggggagtcaggcaactatggatgaacgaaatagacagatcgctgagataggtgcctcactgattaagcattggtaactgtcagaccaagtttactcatatatactttagattgatttaaaacttcatttttaatttaaaaggatctaggtgaagatcctttttgataatctcatgaccaaaatcccttaacgtgagttttcgttccactgagcgtcagaccccgtagaaaagatcaaaggatcttcttgagatcctttttttctgcgcgtaatctgctgcttgcaaacaaaaaaaccaccgctaccagcggtggtttgtttgccggatcaagagctaccaactctttttccgaaggtaactggcttcagcagagcgcagataccaaatactgttcttctagtgtagccgtagttaggccaccacttcaagaactctgtagcaccgcctacatacctcgctctgctaatcctgttaccagtggctgctgccagtggcgataagtcgtgtcttaccgggttggactcaagacgatagttaccggataaggcgcagcggtcgggctgaacggggggttcgtgcacacagcccagcttggagcgaacgacctacaccgaactgagatacctacagcgtgagctatgagaaagcgccacgcttcccgaagggagaaaggcggacaggtatccggtaagcggcagggtcggaacaggagagcgcacgagggagcttccagggggaaacgcctggtatctttatagtcctgtcgggtttcgccacctctgacttgagcgtcgatttttgtgatgctcgtcaggggggcggagcctatggaaaaacgccagcaacgcggcctttttacggttcctggccttttgctggccttttgctcacatgttctttcctgcgttatcccctgattctgtggataaccgtattaccgcctttgagtgagctgataccgctcgccgcagccgaacgaccgagcgcagcgagtcagtgagcgaggaagcggaagagcgcccaatacgcaaaccgcctctccccgcgcgttggccgattcattaatgcagctggcacgacaggtttcccgactggaaagcgggcagtgagcgcaacgcaattaatgtgagttagctcactcattaggcaccccaggctttacactttatgcttccggctcgtatgttgtgtggaattgtgagcggataacaatttcacacaggaaacagctatgaccatgattacgccaagcgcgcaattaaccctcactaaagggaacaaaagctggagctgcaagcttaatgtagtcttatgcaatactcttgtagtcttgcaacatggtaacgatgagttagcaacatgccttacaaggagagaaaaagcaccgtgcatgccgattggtggaagtaaggtggtacgatcgtgccttattaggaaggcaacagacgggtctgacatggattggacgaaccactgaattgccgcattgcagagatattgtatttaagtgcctagctcgatacataaacgggtctctctggttagaccagatctgagcctgggagctctctggctaactagggaacccactgcttaagcctcaataaagcttgccttgagtgcttcaagtagtgtgtgcccgtctgttgtgtgactctggtaactagagatccctcagacccttttagtcagtgtggaaaatctctagcagtggcgcccgaacagggacttgaaagcgaaagggaaaccagaggagctctctcgacgcaggactcggcttgctgaagcgcgcacggcaagaggcgaggggcggcgactggtgagtacgccaaaaattttgactagcggaggctagaaggagagagatgggtgcgagagcgtcagtattaagcgggggagaattagatcgcgatgggaaaaaattcggttaaggccagggggaaagaaaaaatataaattaaaacatatagtatgggcaagcagggagctagaacgattcgcagttaatcctggcctgttagaaacatcagaaggctgtagacaaatactgggacagctacaaccatcccttcagacaggatcagaagaacttagatcattatataatacagtagcaaccctctattgtgtgcatcaaaggatagagataaaagacaccaaggaagctttagacaagatagaggaagagcaaaacaaaagtaagaccaccgcacagcaagcggccgctgatcttcagacctggaggaggagatatgagggacaattggagaagtgaattatataaatataaagtagtaaaaattgaaccattaggagtagcacccaccaaggcaaagagaagagtggtgcagagagaaaaaagagcagtgggaataggagctttgttccttgggttcttgggagcagcaggaagcactatgggcgcagcgtcaatgacgctgacggtacaggccagacaattattgtctggtatagtgcagcagcagaacaatttgctgagggctattgaggcgcaacagcatctgttgcaactcacagtctggggcatcaagcagctccaggcaagaatcctggctgtggaaagatacctaaaggatcaacagctcctggggatttggggttgctctggaaaactcatttgcaccactgctgtgccttggaatgctagttggagtaataaatctctggaacagatttggaatcacacgacctggatggagtgggacagagaaattaacaattacacaagcttaatacactccttaattgaagaatcgcaaaaccagcaagaaaagaatgaacaagaattattggaattagataaatgggcaagtttgtggaattggtttaacataacaaattggctgtggtatataaaattattcataatgatagtaggaggcttggtaggtttaagaatagtttttgctgtactttctatagtgaatagagttaggcagggatattcaccattatcgtttcagacccacctcccaaccccgaggggacccttgcgccttttccaaggcagccctgggtttgcgcagggacgcggctgctctgggcgtggttccgggaaacgcagcggcgccgaccctgggtctcgcacattcttcacgtccgttcgcagcgtcacccggatcttcgccgctacccttgtgggccccccggcgacgcttcctgctccgcccctaagtcgggaaggttccttgcggttcgcggcgtgccggacgtgacaaacggaagccgcacgtctcactagtaccctcgcagacggacagcgccagggagcaatggcagcgcgccgaccgcgatgggctgtggccaatagcggctgctcagcagggcgcgccgagagcagcggccgggaaggggcggtgcgggaggcggggtgtggggcggtagtgtgggccctgttcctgcccgcgcggtgttccgcattctgcaagcctccggagcgcacgtcggcagtcggctccctcgttgaccgaatcaccgacctctctccccagggggtacccagctgtctagagaattctagatcttgagacaaatggcagtattcatccacaattttaaaagaaaaggggggattggggggtacagtgcaggggaaagaatagtagacataatagcaacagacatacaaactaaagaattacaaaaacaaattacaaaaattcaaaattttcgggtttattacagggacagcagagatccactttggcgccggctcgaggggg

SEQ ID NO: 31 - protein, 325 aa, Artificial Sequence
  Synthetic Polypeptide
MIKIATRKYLGKQNVYDIGVERDHNFALKNGFIASNCADGFYKDRYVYRHFASAALPIPEVLDIGEFSESLTYCISRRAQGVTLQDLPETELPAVLQPVAEAMDAIAAADLSQTSGFGPFGPQGIGQYTTWRDFICAIADPHVYHWQTVMDDTVSASVAQALDELMLWAEDCPEVRHLVHADFGSNNVLTDNGRITAVIDWSEAMFGDSQYEVANIFFWRPWLACMEQQTRYFERRHPELAGSPRLRAYMLRIGLDQLYQSLVDGNFDDAAWAQGRCDAIVRSGAGTVGRTQIARRSAAVWTDGCVEVLADSGNRRPSTRPRAKE

SEQ ID NO: 32 - DNA, 9672 bp, Artificial Sequence
  Synthetic Polynucleotide
cccggggttattaatagtaatcaattacggggtcattagttcatagcccatatatggagttccgcgttacataacttacggtaaatggcccgcctggctgaccgcccaacgacccccgcccattgacgtcaataatgacgtatgttcccatagtaacgccaatagggactttccattgacgtcaatgggtggagtatttacggtaaactgcccacttggcagtacatcaagtgtatcatatgccaagtacgccccctattgacgtcaatgacggtaaatggcccgcctggcattatgcccagtacatgaccttatgggactttcctacttggcagtacatctacgtattagtcatcgctattaccatggtgatgcggttttggcagtacatcaatgggcgtggatagcggtttgactcacggggatttccaagtctccaccccattgacgtcaatgggagtttgttttggcaccaaaatcaacgggactttccaaaatgtcgtaacaactccgccccattgacgcaaatgggcggtaggcgtgtacggtgggaggtctatataagcagagctctctggctaactgtcgggatcaacaagtttgtacaaaaaagcaggctccgaattcaccggtgccaccatgaaaaagcctgaactcaccgcgacgtctgtcgagaagtttctgatcgaaaagttcgacagcgtctccgacctgatgcagctctcggagggcgaagaatctcgtgctttcagcttcgatgtaggagggcgtggatatgtcctgcgggtaaatagctgcgccgatggtttctacaaagatcgttatgtttatcggcactttgcatcggccgcgctcccgattccggaagtgcttgacattggggaatttagcgagagcctgacctattgcatctcccgccgtgcacagggtgtcacgttgcaagacctgcctgaaaccgaactgcccgctgttctgcagccggtcgcggaggccatggatgcgatcgctgcggccgatcttagccagacgagcgggttcggcccattcggaccgcaaggaatcggtcaatacactacatggcgtgatttcatatgcgcgattgctgatccccatgtgtatcactggcaaactgtgatggacgacaccgtcagtgcgtccgtcgcgcaggctctcgatgagctgatgctttgggccgaggactgccccgaagtccggcacctcgtgcacgcggatttcggctccaacaatgtcctgacggacaatggccgcataacagcggtcattgactggagcgaggcgatgttcggggattcccaatacgaggtcgccaacatcttcttctggaggccgtggttggcttgcctttcatacgagaccgagatcctgactgtcgagtacggattgcttcctatcggcaaaatcgtggagaagaggattgaatgtaccgtctattcagtcgataataatgggaacatctacacacagcccgtggctcaatggcacgacagaggagagcaggaagtttttgaatactgtctcgaggacggatccctcatccgcgctactaaagatcataagtttatgaccgtggacggccagatgctgccaattgacgaaatttttgaacgagagctggatctgatgagagtcgacaaccttccaaactgattaattaagaattcgacccagctttcttgtacaaagtggttggtaagcctatccctaaccctctcctcggtctcgattctacgtagtaatgagctagcagtctcgaggttaacgaattccgccccccccctaacgttactggccgaagccgcttggaataaggccggtgtgcgcttgtctatatgttattttccaccatattgccgtcttttggcaatgtgagggcccggaaacctggccctgtcttcttgacgagcattcctaggggtctttcccctctcgccaaaggaatgcaaggtctgttgaatgtcgtgaaggaagcagttcctctggaagcttcttgaagacaaacaacgtctgtagcgaccctttgcaggcagcggaaccccccacctggcgacaggtgcccctgcggccaaaagccacgtgtataagatacacctgcaaaggcggcacaaccccagtgccacgttgtgagttggatagttgtggaaagagtcaaatggctctcctcaagcgtattcaacaaggggctgaaggatgcccagaaggtaccccattgtatgggatctgatctggggcctcggtgcacatgctttacatgtgtttagtcgaggttaaaaaaacgtctaggccccccgaaccacggggacgtggttttcctttgaaaaacacgataataccatggccatgagcgagctgattaaggagaacatgcacatgaagctgtacatggagggcaccgtggacaaccatcacttcaagtgcacatccgagggcgaaggcaagccctacgagggcacccagaccatgagaatcaaggtggtcgagggcggccctctccccttcgccttcgacatcctggctactagcttcctctacggcagcaagaccttcatcaaccacacccagggcatccccgacttcttcaagcagtccttccctgagggcttcacatgggagagagtcaccacatacgaagacgggggcgtgctgaccgctacccaggacaccagcctccaggacggctgcctcatctacaacgtcaagatcagaggggtgaacttcacatccaacggccctgtgatgcagaagaaaacactcggctgggaggccttcaccgagacgctgtaccccgctgacggcggcctggaaggcagaaacgacatggccctgaagctcgtgggcgggagccatctgatcgcaaacatcaagaccacatatagatccaagaaacccgctaagaacctcaagatgcctggcgtctactatgtggactacagactggaaagaatcaaggaggccaacaacgagacctacgtcgagcagcacgaggtggcagtggccagatactgcgacctccctagcaaactggggcacaagcttaattaacaccggtggcgcgttaagtcgacaatcaacctctggattacaaaatttgtgaaagattgactggtattcttaactatgttgctccttttacgctatgtggatacgctgctttaatgcctttgtatcatgctattgcttcccgtatggctttcattttctcctccttgtataaatcctggttgctgtctctttatgaggagttgtggcccgttgtcaggcaacgtggcgtggtgtgcactgtgtttgctgacgcaacccccactggttggggcattgccaccacctgtcagctcctttccgggactttcgctttccccctccctattgccacggcggaactcatcgccgcctgccttgcccgctgctggacaggggctcggctgttgggcactgacaattccgtggtgttgtcggggaaatcatcgtcctttccttggctgctcgcctgtgttgccacctggattctgcgcgggacgtccttctgctacgtcccttcggccctcaatccagcggaccttccttcccgcggcctgctgccggctctgcggcctcttccgcgtcttcgccttcgccctcagacgagtcggatctccctttgggccgcctccccgcgtcgactttaagaccaatgacttacaaggcagctgtagatcttagccactttttaaaagaaaaggggggactggaagggctaattcactcccaacgaagacaagatctgctttttgcttgtactgggtctctctggttagaccagatctgagcctgggagctctctggctaactagggaacccactgcttaagcctcaataaagcttgccttgagtgcttcaagtagtgtgtgcccgtctgttgtgtgactctggtaactagagatccctcagacccttttagtcagtgtggaaaatctctagcagtacgtatagtagttcatgtcatcttattattcagtatttataacttgcaaagaaatgaatatcagagagtgagaggaacttgtttattgcagcttataatggttacaaataaagcaatagcatcacaaatttcacaaataaagcatttttttcactgcattctagttgtggtttgtccaaactcatcaatgtatcttatcatgtctggctctagctatcccgcccctaactccgcccatcccgcccctaactccgcccagttccgcccattctccgccccatggctgactaattttttttatttatgcagaggccgaggccgcctcggcctctgagctattccagaagtagtgaggaggcttttttggaggcctagggacgtacccaattcgccctatagtgagtcgtattacgcgcgctcactggccgtcgttttacaacgtcgtgactgggaaaaccctggcgttacccaacttaatcgccttgcagcacatccccctttcgccagctggcgtaatagcgaagaggcccgcaccgatcgcccttcccaacagttgcgcagcctgaatggcgaatgggacgcgccctgtagcggcgcattaagcgcggcgggtgtggtggttacgcgcagcgtgaccgctacacttgccagcgccctagcgcccgctcctttcgctttcttcccttcctttctcgccacgttcgccggctttccccgtcaagctctaaatcgggggctccctttagggttccgatttagtgctttacggcacctcgaccccaaaaaacttgattagggtgatggttcacgtagtgggccatcgccctgatagacggtttttcgccctttgacgttggagtccacgttctttaatagtggactcttgttccaaactggaacaacactcaaccctatctcggtctattcttttgatttataagggattttgccgatttcggcctattggttaaaaaatgagctgatttaacaaaaatttaacgcgaattttaacaaaatattaacgcttacaatttaggtggcacttttcggggaaatgtgcgcggaacccctatttgtttatttttctaaatacattcaaatatgtatccgctcatgagacaataaccctgataaatgcttcaataatattgaaaaaggaagagtatgagtattcaacatttccgtgtcgcccttattcccttttttgcggcattttgccttcctgtttttgctcacccagaaacgctggtgaaagtaaaagatgctgaagatcagttgggtgcacgagtgggttacatcgaactggatctcaacagcggtaagatccttgagagttttcgccccgaagaacgttttccaatgatgagcacttttaaagttctgctatgtggcgcggtattatcccgtattgacgccgggcaagagcaactcggtcgccgcatacactattctcagaatgacttggttgagtactcaccagtcacagaaaagcatcttacggatggcatgacagtaagagaattatgcagtgctgccataaccatgagtgataacactgcggccaacttacttctgacaacgatcggaggaccgaaggagctaaccgcttttttgcacaacatgggggatcatgtaactcgccttgatcgttgggaaccggagctgaatgaagccataccaaacgacgagcgtgacaccacgatgcctgtagcaatggcaacaacgttgcgcaaactattaactggcgaactacttactctagcttcccggcaacaattaatagactggatggaggcggataaagttgcaggaccacttctgcgctcggcccttccggctggctggtttattgctgataaatctggagccggtgagcgtgggtctcgcggtatcattgcagcactggggccagatggtaagccctcccgtatcgtagttatctacacgacggggagtcaggcaactatggatgaacgaaatagacagatcgctgagataggtgcctcactgattaagcattggtaactgtcagaccaagtttactcatatatactttagattgatttaaaacttcatttttaatttaaaaggatctaggtgaagatcctttttgataatctcatgaccaaaatcccttaacgtgagttttcgttccactgagcgtcagaccccgtagaaaagatcaaaggatcttcttgagatcctttttttctgcgcgtaatctgctgcttgcaaacaaaaaaaccaccgctaccagcggtggtttgtttgccggatcaagagctaccaactctttttccgaaggtaactggcttcagcagagcgcagataccaaatactgttcttctagtgtagccgtagttaggccaccacttcaagaactctgtagcaccgcctacatacctcgctctgctaatcctgttaccagtggctgctgccagtggcgataagtcgtgtcttaccgggttggactcaagacgatagttaccggataaggcgcagcggtcgggctgaacggggggttcgtgcacacagcccagcttggagcgaacgacctacaccgaactgagatacctacagcgtgagctatgagaaagcgccacgcttcccgaagggagaaaggcggacaggtatccggtaagcggcagggtcggaacaggagagcgcacgagggagcttccagggggaaacgcctggtatctttatagtcctgtcgggtttcgccacctctgacttgagcgtcgatttttgtgatgctcgtcaggggggcggagcctatggaaaaacgccagcaacgcggcctttttacggttcctggccttttgctggccttttgctcacatgttctttcctgcgttatcccctgattctgtggataaccgtattaccgcctttgagtgagctgataccgctcgccgcagccgaacgaccgagcgcagcgagtcagtgagcgaggaagcggaagagcgcccaatacgcaaaccgcctctccccgcgcgttggccgattcattaatgcagctggcacgacaggtttcccgactggaaagcgggcagtgagcgcaacgcaattaatgtgagttagctcactcattaggcaccccaggctttacactttatgcttccggctcgtatgttgtgtggaattgtgagcggataacaatttcacacaggaaacagctatgaccatgattacgccaagcgcgcaattaaccctcactaaagggaacaaaagctggagctgcaagcttaatgtagtcttatgcaatactcttgtagtcttgcaacatggtaacgatgagttagcaacatgccttacaaggagagaaaaagcaccgtgcatgccgattggtggaagtaaggtggtacgatcgtgccttattaggaaggcaacagacgggtctgacatggattggacgaaccactgaattgccgcattgcagagatattgtatttaagtgcctagctcgatacataaacgggtctctctggttagaccagatctgagcctgggagctctctggctaactagggaacccactgcttaagcctcaataaagcttgccttgagtgcttcaagtagtgtgtgcccgtctgttgtgtgactctggtaactagagatccctcagacccttttagtcagtgtggaaaatctctagcagtggcgcccgaacagggacttgaaagcgaaagggaaaccagaggagctctctcgacgcaggactcggcttgctgaagcgcgcacggcaagaggcgaggggcggcgactggtgagtacgccaaaaattttgactagcggaggctagaaggagagagatgggtgcgagagcgtcagtattaagcgggggagaattagatcgcgatgggaaaaaattcggttaaggccagggggaaagaaaaaatataaattaaaacatatagtatgggcaagcagggagctagaacgattcgcagttaatcctggcctgttagaaacatcagaaggctgtagacaaatactgggacagctacaaccatcccttcagacaggatcagaagaacttagatcattatataatacagtagcaaccctctattgtgtgcatcaaaggatagagataaaagacaccaaggaagctttagacaagatagaggaagagcaaaacaaaagtaagaccaccgcacagcaagcggccgctgatcttcagacctggaggaggagatatgagggacaattggagaagtgaattatataaatataaagtagtaaaaattgaaccattaggagtagcacccaccaaggcaaagagaagagtggtgcagagagaaaaaagagcagtgggaataggagctttgttccttgggttcttgggagcagcaggaagcactatgggcgcagcgtcaatgacgctgacggtacaggccagacaattattgtctggtatagtgcagcagcagaacaatttgctgagggctattgaggcgcaacagcatctgttgcaactcacagtctggggcatcaagcagctccaggcaagaatcctggctgtggaaagatacctaaaggatcaacagctcctggggatttggggttgctctggaaaactcatttgcaccactgctgtgccttggaatgctagttggagtaataaatctctggaacagatttggaatcacacgacctggatggagtgggacagagaaattaacaattacacaagcttaatacactccttaattgaagaatcgcaaaaccagcaagaaaagaatgaacaagaattattggaattagataaatgggcaagtttgtggaattggtttaacataacaaattggctgtggtatataaaattattcataatgatagtaggaggcttggtaggtttaagaatagtttttgctgtactttctatagtgaatagagttaggcagggatattcaccattatcgtttcagacccacctcccaaccccgaggggacccttgcgccttttccaaggcagccctgggtttgcgcagggacgcggctgctctgggcgtggttccgggaaacgcagcggcgccgaccctgggtctcgcacattcttcacgtccgttcgcagcgtcacccggatcttcgccgctacccttgtgggccccccggcgacgcttcctgctccgcccctaagtcgggaaggttccttgcggttcgcggcgtgccggacgtgacaaacggaagccgcacgtctcactagtaccctcgcagacggacagcgccagggagcaatggcagcgcgccgaccgcgatgggctgtggccaatagcggctgctcagcagggcgcgccgagagcagcggccgggaaggggcggtgcgggaggcggggtgtggggcggtagtgtgggccctgttcctgcccgcgcggtgttccgcattctgcaagcctccggagcgcacgtcggcagtcggctccctcgttgaccgaatcaccgacctctctccccagggggtacccagctgtctagagaattctagatcttgagacaaatggcagtattcatccacaattttaaaagaaaaggggggattggggggtacagtgcaggggaaagaatagtagacataatagcaacagacatacaaactaaagaattacaaaaacaaattacaaaaattcaaaattttcgggtttattacagggacagcagagatccactttggcgccggctcgaggggg

SEQ ID NO: 33 - protein, 342 aa, Artificial Sequence
  Synthetic Polypeptide
MKKPELTATSVEKFLIEKFDSVSDLMQLSEGEESRAFSFDVGGRGYVLRVNSCADGFYKDRYVYRHFASAALPIPEVLDIGEFSESLTYCISRRAQGVTLQDLPETELPAVLQPVAEAMDAIAAADLSQTSGFGPFGPQGIGQYTTWRDFICAIADPHVYHWQTVMDDTVSASVAQALDELMLWAEDCPEVRHLVHADFGSNNVLTDNGRITAVIDWSEAMFGDSQYEVANIFFWRPWLACLSYETEILTVEYGLLPIGKIVEKRIECTVYSVDNNGNIYTQPVAQWHDRGEQEVFEYCLEDGSLIRATKDHKFMTVDGQMLPIDEIFERELDLMRVDNLPN

SEQ ID NO: 34 - DNA, 9063 bp, Artificial Sequence
  Synthetic Polynucleotide
cccggggttattaatagtaatcaattacggggtcattagttcatagcccatatatggagttccgcgttacataacttacggtaaatggcccgcctggctgaccgcccaacgacccccgcccattgacgtcaataatgacgtatgttcccatagtaacgccaatagggactttccattgacgtcaatgggtggagtatttacggtaaactgcccacttggcagtacatcaagtgtatcatatgccaagtacgccccctattgacgtcaatgacggtaaatggcccgcctggcattatgcccagtacatgaccttatgggactttcctacttggcagtacatctacgtattagtcatcgctattaccatggtgatgcggttttggcagtacatcaatgggcgtggatagcggtttgactcacggggatttccaagtctccaccccattgacgtcaatgggagtttgttttggcaccaaaatcaacgggactttccaaaatgtcgtaacaactccgccccattgacgcaaatgggcggtaggcgtgtacggtgggaggtctatataagcagagctctctggctaactgtcgggatcaacaagtttgtacaaaaaagcaggctccgaattcaccggtgccgccaccatgattaagatcgctacgcgtaagtacctggggaaacagaacgtctacgacataggtgtggagcgcgatcacaactttgctctgaaaaatggatttatcgccagcaactgtatggagcagcagacgcgctacttcgagcggaggcatccggagcttgcaggatcgccgcggctccgggcgtatatgctccgcattggtcttgaccaactctatcagagcttggttgacggcaatttcgatgatgcagcttgggcgcagggtcgatgcgacgcaatcgtccgatccggagccgggactgtcgggcgtacacaaatcgcccgcagaagcgcggccgtctggaccgatggctgtgtagaagtactcgccgatagtggaaaccgacgccccagcactcgtccgagggcaaaggaatagttaattaagaattcgacccagctttcttgtacaaagtggttggtaagcctatccctaaccctctcctcggtctcgattctacgtagtaatgagctagcagtctcgaggttaacgaattccgccccccccctaacgttactggccgaagccgcttggaataaggccggtgtgcgcttgtctatatgttattttccaccatattgccgtcttttggcaatgtgagggcccggaaacctggccctgtcttcttgacgagcattcctaggggtctttcccctctcgccaaaggaatgcaaggtctgttgaatgtcgtgaaggaagcagttcctctggaagcttcttgaagacaaacaacgtctgtagcgaccctttgcaggcagcggaaccccccacctggcgacaggtgcccctgcggccaaaagccacgtgtataagatacacctgcaaaggcggcacaaccccagtgccacgttgtgagttggatagttgtggaaagagtcaaatggctctcctcaagcgtattcaacaaggggctgaaggatgcccagaaggtaccccattgtatgggatctgatctggggcctcggtgcacatgctttacatgtgtttagtcgaggttaaaaaaacgtctaggccccccgaaccacggggacgtggttttcctttgaaaaacacgataataccatggtgagcaagggcgaggaggataacatggccatcatcaaggagttcatgcgcttcaaggtgcacatggagggctccgtgaacggccacgagttcgagatcgagggcgagggcgagggccgcccctacgagggcacccagaccgccaagctgaaggtgaccaagggtggccccctgcccttcgcctgggacatcctgtcccctcagttcatgtacggctccaaggcctacgtgaagcaccccgccgacatccccgactacttgaagctgtccttccccgagggcttcaagtgggagcgcgtgatgaacttcgaggacggcggcgtggtgaccgtgacccaggactcctccctgcaggacggcgagttcatctacaaggtgaagctgcgcggcaccaacttcccctccgacggccccgtaatgcagaagaagaccatgggctgggaggcctcctccgagcggatgtaccccgaggacggcgccctgaagggcgagatcaagcagaggctgaagctgaaggacggcggccactacgacgctgaggtcaagaccacctacaaggccaagaagcccgtgcagctgcccggcgcctacaacgtcaacatcaagttggacatcacctcccacaacgaggactacaccatcgtggaacagtacgaacgcgccgagggccgccactccaccggcggcatggacgagctgtacaagtaacaccggtggcgcgttaagtcgacaatcaacctctggattacaaaatttgtgaaagattgactggtattcttaactatgttgctccttttacgctatgtggatacgctgctttaatgcctttgtatcatgctattgcttcccgtatggctttcattttctcctccttgtataaatcctggttgctgtctctttatgaggagttgtggcccgttgtcaggcaacgtggcgtggtgtgcactgtgtttgctgacgcaacccccactggttggggcattgccaccacctgtcagctcctttccgggactttcgctttccccctccctattgccacggcggaactcatcgccgcctgccttgcccgctgctggacaggggctcggctgttgggcactgacaattccgtggtgttgtcggggaaatcatcgtcctttccttggctgctcgcctgtgttgccacctggattctgcgcgggacgtccttctgctacgtcccttcggccctcaatccagcggaccttccttcccgcggcctgctgccggctctgcggcctcttccgcgtcttcgccttcgccctcagacgagtcggatctccctttgggccgcctccccgcgtcgactttaagaccaatgacttacaaggcagctgtagatcttagccactttttaaaagaaaaggggggactggaagggctaattcactcccaacgaagacaagatctgctttttgcttgtactgggtctctctggttagaccagatctgagcctgggagctctctggctaactagggaacccactgcttaagcctcaataaagcttgccttgagtgcttcaagtagtgtgtgcccgtctgttgtgtgactctggtaactagagatccctcagacccttttagtcagtgtggaaaatctctagcagtacgtatagtagttcatgtcatcttattattcagtatttataacttgcaaagaaatgaatatcagagagtgagaggaacttgtttattgcagcttataatggttacaaataaagcaatagcatcacaaatttcacaaataaagcatttttttcactgcattctagttgtggtttgtccaaactcatcaatgtatcttatcatgtctggctctagctatcccgcccctaactccgcccatcccgcccctaactccgcccagttccgcccattctccgccccatggctgactaattttttttatttatgcagaggccgaggccgcctcggcctctgagctattccagaagtagtgaggaggcttttttggaggcctagggacgtacccaattcgccctatagtgagtcgtattacgcgcgctcactggccgtcgttttacaacgtcgtgactgggaaaaccctggcgttacccaacttaatcgccttgcagcacatccccctttcgccagctggcgtaatagcgaagaggcccgcaccgatcgcccttcccaacagttgcgcagcctgaatggcgaatgggacgcgccctgtagcggcgcattaagcgcggcgggtgtggtggttacgcgcagcgtgaccgctacacttgccagcgccctagcgcccgctcctttcgctttcttcccttcctttctcgccacgttcgccggctttccccgtcaagctctaaatcgggggctccctttagggttccgatttagtgctttacggcacctcgaccccaaaaaacttgattagggtgatggttcacgtagtgggccatcgccctgatagacggtttttcgccctttgacgttggagtccacgttctttaatagtggactcttgttccaaactggaacaacactcaaccctatctcggtctattcttttgatttataagggattttgccgatttcggcctattggttaaaaaatgagctgatttaacaaaaatttaacgcgaattttaacaaaatattaacgcttacaatttaggtggcacttttcggggaaatgtgcgcggaacccctatttgtttatttttctaaatacattcaaatatgtatccgctcatgagacaataaccctgataaatgcttcaataatattgaaaaaggaagagtatgagtattcaacatttccgtgtcgcccttattcccttttttgcggcattttgccttcctgtttttgctcacccagaaacgctggtgaaagtaaaagatgctgaagatcagttgggtgcacgagtgggttacatcgaactggatctcaacagcggtaagatccttgagagttttcgccccgaagaacgttttccaatgatgagcacttttaaagttctgctatgtggcgcggtattatcccgtattgacgccgggcaagagcaactcggtcgccgcatacactattctcagaatgacttggttgagtactcaccagtcacagaaaagcatcttacggatggcatgacagtaagagaattatgcagtgctgccataaccatgagtgataacactgcggccaacttacttctgacaacgatcggaggaccgaaggagctaaccgcttttttgcacaacatgggggatcatgtaactcgccttgatcgttgggaaccggagctgaatgaagccataccaaacgacgagcgtgacaccacgatgcctgtagcaatggcaacaacgttgcgcaaactattaactggcgaactacttactctagcttcccggcaacaattaatagactggatggaggcggataaagttgcaggaccacttctgcgctcggcccttccggctggctggtttattgctgataaatctggagccggtgagcgtgggtctcgcggtatcattgcagcactggggccagatggtaagccctcccgtatcgtagttatctacacgacggggagtcaggcaactatggatgaacgaaatagacagatcgctgagataggtgcctcactgattaagcattggtaactgtcagaccaagtttactcatatatactttagattgatttaaaacttcatttttaatttaaaaggatctaggtgaagatcctttttgataatctcatgaccaaaatcccttaacgtgagttttcgttccactgagcgtcagaccccgtagaaaagatcaaaggatcttcttgagatcctttttttctgcgcgtaatctgctgcttgcaaacaaaaaaaccaccgctaccagcggtggtttgtttgccggatcaagagctaccaactctttttccgaaggtaactggcttcagcagagcgcagataccaaatactgttcttctagtgtagccgtagttaggccaccacttcaagaactctgtagcaccgcctacatacctcgctctgctaatcctgttaccagtggctgctgccagtggcgataagtcgtgtcttaccgggttggactcaagacgatagttaccggataaggcgcagcggtcgggctgaacggggggttcgtgcacacagcccagcttggagcgaacgacctacaccgaactgagatacctacagcgtgagctatgagaaagcgccacgcttcccgaagggagaaaggcggacaggtatccggtaagcggcagggtcggaacaggagagcgcacgagggagcttccagggggaaacgcctggtatctttatagtcctgtcgggtttcgccacctctgacttgagcgtcgatttttgtgatgctcgtcaggggggcggagcctatggaaaaacgccagcaacgcggcctttttacggttcctggccttttgctggccttttgctcacatgttctttcctgcgttatcccctgattctgtggataaccgtattaccgcctttgagtgagctgataccgctcgccgcagccgaacgaccgagcgcagcgagtcagtgagcgaggaagcggaagagcgcccaatacgcaaaccgcctctccccgcgcgttggccgattcattaatgcagctggcacgacaggtttcccgactggaaagcgggcagtgagcgcaacgcaattaatgtgagttagctcactcattaggcaccccaggctttacactttatgcttccggctcgtatgttgtgtggaattgtgagcggataacaatttcacacaggaaacagctatgaccatgattacgccaagcgcgcaattaaccctcactaaagggaacaaaagctggagctgcaagcttaatgtagtcttatgcaatactcttgtagtcttgcaacatggtaacgatgagttagcaacatgccttacaaggagagaaaaagcaccgtgcatgccgattggtggaagtaaggtggtacgatcgtgccttattaggaaggcaacagacgggtctgacatggattggacgaaccactgaattgccgcattgcagagatattgtatttaagtgcctagctcgatacataaacgggtctctctggttagaccagatctgagcctgggagctctctggctaactagggaacccactgcttaagcctcaataaagcttgccttgagtgcttcaagtagtgtgtgcccgtctgttgtgtgactctggtaactagagatccctcagacccttttagtcagtgtggaaaatctctagcagtggcgcccgaacagggacttgaaagcgaaagggaaaccagaggagctctctcgacgcaggactcggcttgctgaagcgcgcacggcaagaggcgaggggcggcgactggtgagtacgccaaaaattttgactagcggaggctagaaggagagagatgggtgcgagagcgtcagtattaagcgggggagaattagatcgcgatgggaaaaaattcggttaaggccagggggaaagaaaaaatataaattaaaacatatagtatgggcaagcagggagctagaacgattcgcagttaatcctggcctgttagaaacatcagaaggctgtagacaaatactgggacagctacaaccatcccttcagacaggatcagaagaacttagatcattatataatacagtagcaaccctctattgtgtgcatcaaaggatagagataaaagacaccaaggaagctttagacaagatagaggaagagcaaaacaaaagtaagaccaccgcacagcaagcggccgctgatcttcagacctggaggaggagatatgagggacaattggagaagtgaattatataaatataaagtagtaaaaattgaaccattaggagtagcacccaccaaggcaaagagaagagtggtgcagagagaaaaaagagcagtgggaataggagctttgttccttgggttcttgggagcagcaggaagcactatgggcgcagcgtcaatgacgctgacggtacaggccagacaattattgtctggtatagtgcagcagcagaacaatttgctgagggctattgaggcgcaacagcatctgttgcaactcacagtctggggcatcaagcagctccaggcaagaatcctggctgtggaaagatacctaaaggatcaacagctcctggggatttggggttgctctggaaaactcatttgcaccactgctgtgccttggaatgctagttggagtaataaatctctggaacagatttggaatcacacgacctggatggagtgggacagagaaattaacaattacacaagcttaatacactccttaattgaagaatcgcaaaaccagcaagaaaagaatgaacaagaattattggaattagataaatgggcaagtttgtggaattggtttaacataacaaattggctgtggtatataaaattattcataatgatagtaggaggcttggtaggtttaagaatagtttttgctgtactttctatagtgaatagagttaggcagggatattcaccattatcgtttcagacccacctcccaaccccgaggggacccttgcgccttttccaaggcagccctgggtttgcgcagggacgcggctgctctgggcgtggttccgggaaacgcagcggcgccgaccctgggtctcgcacattcttcacgtccgttcgcagcgtcacccggatcttcgccgctacccttgtgggccccccggcgacgcttcctgctccgcccctaagtcgggaaggttccttgcggttcgcggcgtgccggacgtgacaaacggaagccgcacgtctcactagtaccctcgcagacggacagcgccagggagcaatggcagcgcgccgaccgcgatgggctgtggccaatagcggctgctcagcagggcgcgccgagagcagcggccgggaaggggcggtgcgggaggcggggtgtggggcggtagtgtgggccctgttcctgcccgcgcggtgttccgcattctgcaagcctccggagcgcacgtcggcagtcggctccctcgttgaccgaatcaccgacctctctccccagggggtacccagctgtctagagaattctagatcttgagacaaatggcagtattcatccacaattttaaaagaaaaggggggattggggggtacagtgcaggggaaagaatagtagacataatagcaacagacatacaaactaaagaattacaaaaacaaattacaaaaattcaaaattttcgggtttattacagggacagcagagatccactttggcgccggctcgaggggg

SEQ ID NO: 35 - protein, 137 aa, Artificial Sequence
  Synthetic Polypeptide
MIKIATRKYLGKQNVYDIGVERDHNFALKNGFIASNCMEQQTRYFERRHPELAGSPRLRAYMLRIGLDQLYQSLVDGNFDDAAWAQGRCDAIVRSGAGTVGRTQIARRSAAVWTDGCVEVLADSGNRRPSTRPRAKE

SEQ ID NO: 36 - DNA, 9828 bp, Artificial Sequence
  Synthetic Polynucleotide
cccggggttattaatagtaatcaattacggggtcattagttcatagcccatatatggagttccgcgttacataacttacggtaaatggcccgcctggctgaccgcccaacgacccccgcccattgacgtcaataatgacgtatgttcccatagtaacgccaatagggactttccattgacgtcaatgggtggagtatttacggtaaactgcccacttggcagtacatcaagtgtatcatatgccaagtacgccccctattgacgtcaatgacggtaaatggcccgcctggcattatgcccagtacatgaccttatgggactttcctacttggcagtacatctacgtattagtcatcgctattaccatggtgatgcggttttggcagtacatcaatgggcgtggatagcggtttgactcacggggatttccaagtctccaccccattgacgtcaatgggagtttgttttggcaccaaaatcaacgggactttccaaaatgtcgtaacaactccgccccattgacgcaaatgggcggtaggcgtgtacggtgggaggtctatataagcagagctctctggctaactgtcgggatcaacaagtttgtacaaaaaagcaggctccgaattcaccggtgacaccatgaaaaagcctgaactcaccgcgacgtctgtcgagaagtttctgatcgaaaagttcgacagcgtctccgacctgatgcagctctcggagggcgaagaatctcgtgctttcagcttcgatgtaggagggcgtggatatgtcctgcgggtaaatagctgcgccgatggtttctacaaagatcgttatgtttatcggcactttgcatcggccgcgctcccgattccggaagtgcttgacattggggaatttagcgagagcctgacctattgcatctcccgccgtgcacagggtgtcacgttgcaagacctgcctgaaaccgaactgcccgctgttctgcagccggtcgcggaggccatggatgcgatcgctgcggccgatcttagccagacgagcgggttcggcccattcggaccgcaaggaatcggtcaatacactacatggcgtgatttcatatgcgcgattgctgatccccatgtgtatcactggcaaactgtgatggacgacaccgtcagtgcgtccgtcgcgcaggctctcgatgagctgatgctttgggccgaggactgccccgaagtccggcacctcgtgcacgcggatttcggctccaacaatgtcctgacggacaatggccgcataacagcggtcattgactggagcgaggcgatgttcggggattcccaatacgaggtcgccaacatcttcttctggaggccgtggttggcttgtatggagcagcagacgcgctacttcgagcggaggcatccggagcttgcaggatcgccgcggctccgggcgtatatgctccgcattggtcttgaccaactctatcagagcttggttgacggcaatttcgatgatgcagcttgggcgcagggtcgatgcctttcatacgagaccgagatcctgactgtcgagtacggattgcttcctatcggcaaaatcgtggagaagaggattgaatgtaccgtctattcagtcgataataatgggaacatctacacacagcccgtggctcaatggcacgacagaggagagcaggaagtttttgaatactgtctcgaggacggatccctcatccgcgctactaaagatcataagtttatgaccgtggacggccagatgctgccaattgacgaaatttttgaacgagagctggatctgatgagagtcgacaaccttccaaactgattaattaagaattcgacccagctttcttgtacaaagtggttggtaagcctatccctaaccctctcctcggtctcgattctacgtagtaatgagctagcagtctcgaggttaacgaattccgccccccccctaacgttactggccgaagccgcttggaataaggccggtgtgcgcttgtctatatgttattttccaccatattgccgtcttttggcaatgtgagggcccggaaacctggccctgtcttcttgacgagcattcctaggggtctttcccctctcgccaaaggaatgcaaggtctgttgaatgtcgtgaaggaagcagttcctctggaagcttcttgaagacaaacaacgtctgtagcgaccctttgcaggcagcggaaccccccacctggcgacaggtgcccctgcggccaaaagccacgtgtataagatacacctgcaaaggcggcacaaccccagtgccacgttgtgagttggatagttgtggaaagagtcaaatggctctcctcaagcgtattcaacaaggggctgaaggatgcccagaaggtaccccattgtatgggatctgatctggggcctcggtgcacatgctttacatgtgtttagtcgaggttaaaaaaacgtctaggccccccgaaccacggggacgtggttttcctttgaaaaacacgataataccatggccatgagcgagctgattaaggagaacatgcacatgaagctgtacatggagggcaccgtggacaaccatcacttcaagtgcacatccgagggcgaaggcaagccctacgagggcacccagaccatgagaatcaaggtggtcgagggcggccctctccccttcgccttcgacatcctggctactagcttcctctacggcagcaagaccttcatcaaccacacccagggcatccccgacttcttcaagcagtccttccctgagggcttcacatgggagagagtcaccacatacgaagacgggggcgtgctgaccgctacccaggacaccagcctccaggacggctgcctcatctacaacgtcaagatcagaggggtgaacttcacatccaacggccctgtgatgcagaagaaaacactcggctgggaggccttcaccgagacgctgtaccccgctgacggcggcctggaaggcagaaacgacatggccctgaagctcgtgggcgggagccatctgatcgcaaacatcaagaccacatatagatccaagaaacccgctaagaacctcaagatgcctggcgtctactatgtggactacagactggaaagaatcaaggaggccaacaacgagacctacgtcgagcagcacgaggtggcagtggccagatactgcgacctccctagcaaactggggcacaagcttaattaacaccggtggcgcgttaagtcgacaatcaacctctggattacaaaatttgtgaaagattgactggtattcttaactatgttgctccttttacgctatgtggatacgctgctttaatgcctttgtatcatgctattgcttcccgtatggctttcattttctcctccttgtataaatcctggttgctgtctctttatgaggagttgtggcccgttgtcaggcaacgtggcgtggtgtgcactgtgtttgctgacgcaacccccactggttggggcattgccaccacctgtcagctcctttccgggactttcgctttccccctccctattgccacggcggaactcatcgccgcctgccttgcccgctgctggacaggggctcggctgttgggcactgacaattccgtggtgttgtcggggaaatcatcgtcctttccttggctgctcgcctgtgttgccacctggattctgcgcgggacgtccttctgctacgtcccttcggccctcaatccagcggaccttccttcccgcggcctgctgccggctctgcggcctcttccgcgtcttcgccttcgccctcagacgagtcggatctccctttgggccgcctccccgcgtcgactttaagaccaatgacttacaaggcagctgtagatcttagccactttttaaaagaaaaggggggactggaagggctaattcactcccaacgaagacaagatctgctttttgcttgtactgggtctctctggttagaccagatctgagcctgggagctctctggctaactagggaacccactgcttaagcctcaataaagcttgccttgagtgcttcaagtagtgtgtgcccgtctgttgtgtgactctggtaactagagatccctcagacccttttagtcagtgtggaaaatctctagcagtacgtatagtagttcatgtcatcttattattcagtatttataacttgcaaagaaatgaatatcagagagtgagaggaacttgtttattgcagcttataatggttacaaataaagcaatagcatcacaaatttcacaaataaagcatttttttcactgcattctagttgtggtttgtccaaactcatcaatgtatcttatcatgtctggctctagctatcccgcccctaactccgcccatcccgcccctaactccgcccagttccgcccattctccgccccatggctgactaattttttttatttatgcagaggccgaggccgcctcggcctctgagctattccagaagtagtgaggaggcttttttggaggcctagggacgtacccaattcgccctatagtgagtcgtattacgcgcgctcactggccgtcgttttacaacgtcgtgactgggaaaaccctggcgttacccaacttaatcgccttgcagcacatccccctttcgccagctggcgtaatagcgaagaggcccgcaccgatcgcccttcccaacagttgcgcagcctgaatggcgaatgggacgcgccctgtagcggcgcattaagcgcggcgggtgtggtggttacgcgcagcgtgaccgctacacttgccagcgccctagcgcccgctcctttcgctttcttcccttcctttctcgccacgttcgccggctttccccgtcaagctctaaatcgggggctccctttagggttccgatttagtgctttacggcacctcgaccccaaaaaacttgattagggtgatggttcacgtagtgggccatcgccctgatagacggtttttcgccctttgacgttggagtccacgttctttaatagtggactcttgttccaaactggaacaacactcaaccctatctcggtctattcttttgatttataagggattttgccgatttcggcctattggttaaaaaatgagctgatttaacaaaaatttaacgcgaattttaacaaaatattaacgcttacaatttaggtggcacttttcggggaaatgtgcgcggaacccctatttgtttatttttctaaatacattcaaatatgtatccgctcatgagacaataaccctgataaatgcttcaataatattgaaaaaggaagagtatgagtattcaacatttccgtgtcgcccttattcccttttttgcggcattttgccttcctgtttttgctcacccagaaacgctggtgaaagtaaaagatgctgaagatcagttgggtgcacgagtgggttacatcgaactggatctcaacagcggtaagatccttgagagttttcgccccgaagaacgttttccaatgatgagcacttttaaagttctgctatgtggcgcggtattatcccgtattgacgccgggcaagagcaactcggtcgccgcatacactattctcagaatgacttggttgagtactcaccagtcacagaaaagcatcttacggatggcatgacagtaagagaattatgcagtgctgccataaccatgagtgataacactgcggccaacttacttctgacaacgatcggaggaccgaaggagctaaccgcttttttgcacaacatgggggatcatgtaactcgccttgatcgttgggaaccggagctgaatgaagccataccaaacgacgagcgtgacaccacgatgcctgtagcaatggcaacaacgttgcgcaaactattaactggcgaactacttactctagcttcccggcaacaattaatagactggatggaggcggataaagttgcaggaccacttctgcgctcggcccttccggctggctggtttattgctgataaatctggagccggtgagcgtgggtctcgcggtatcattgcagcactggggccagatggtaagccctcccgtatcgtagttatctacacgacggggagtcaggcaactatggatgaacgaaatagacagatcgctgagataggtgcctcactgattaagcattggtaactgtcagaccaagtttactcatatatactttagattgatttaaaacttcatttttaatttaaaaggatctaggtgaagatcctttttgataatctcatgaccaaaatcccttaacgtgagttttcgttccactgagcgtcagaccccgtagaaaagatcaaaggatcttcttgagatcctttttttctgcgcgtaatctgctgcttgcaaacaaaaaaaccaccgctaccagcggtggtttgtttgccggatcaagagctaccaactctttttccgaaggtaactggcttcagcagagcgcagataccaaatactgttcttctagtgtagccgtagttaggccaccacttcaagaactctgtagcaccgcctacatacctcgctctgctaatcctgttaccagtggctgctgccagtggcgataagtcgtgtcttaccgggttggactcaagacgatagttaccggataaggcgcagcggtcgggctgaacggggggttcgtgcacacagcccagcttggagcgaacgacctacaccgaactgagatacctacagcgtgagctatgagaaagcgccacgcttcccgaagggagaaaggcggacaggtatccggtaagcggcagggtcggaacaggagagcgcacgagggagcttccagggggaaacgcctggtatctttatagtcctgtcgggtttcgccacctctgacttgagcgtcgatttttgtgatgctcgtcaggggggcggagcctatggaaaaacgccagcaacgcggcctttttacggttcctggccttttgctggccttttgctcacatgttctttcctgcgttatcccctgattctgtggataaccgtattaccgcctttgagtgagctgataccgctcgccgcagccgaacgaccgagcgcagcgagtcagtgagcgaggaagcggaagagcgcccaatacgcaaaccgcctctccccgcgcgttggccgattcattaatgcagctggcacgacaggtttcccgactggaaagcgggcagtgagcgcaacgcaattaatgtgagttagctcactcattaggcaccccaggctttacactttatgcttccggctcgtatgttgtgtggaattgtgagcggataacaatttcacacaggaaacagctatgaccatgattacgccaagcgcgcaattaaccctcactaaagggaacaaaagctggagctgcaagcttaatgtagtcttatgcaatactcttgtagtcttgcaacatggtaacgatgagttagcaacatgccttacaaggagagaaaaagcaccgtgcatgccgattggtggaagtaaggtggtacgatcgtgccttattaggaaggcaacagacgggtctgacatggattggacgaaccactgaattgccgcattgcagagatattgtatttaagtgcctagctcgatacataaacgggtctctctggttagaccagatctgagcctgggagctctctggctaactagggaacccactgcttaagcctcaataaagcttgccttgagtgcttcaagtagtgtgtgcccgtctgttgtgtgactctggtaactagagatccctcagacccttttagtcagtgtggaaaatctctagcagtggcgcccgaacagggacttgaaagcgaaagggaaaccagaggagctctctcgacgcaggactcggcttgctgaagcgcgcacggcaagaggcgaggggcggcgactggtgagtacgccaaaaattttgactagcggaggctagaaggagagagatgggtgcgagagcgtcagtattaagcgggggagaattagatcgcgatgggaaaaaattcggttaaggccagggggaaagaaaaaatataaattaaaacatatagtatgggcaagcagggagctagaacgattcgcagttaatcctggcctgttagaaacatcagaaggctgtagacaaatactgggacagctacaaccatcccttcagacaggatcagaagaacttagatcattatataatacagtagcaaccctctattgtgtgcatcaaaggatagagataaaagacaccaaggaagctttagacaagatagaggaagagcaaaacaaaagtaagaccaccgcacagcaagcggccgctgatcttcagacctggaggaggagatatgagggacaattggagaagtgaattatataaatataaagtagtaaaaattgaaccattaggagtagcacccaccaaggcaaagagaagagtggtgcagagagaaaaaagagcagtgggaataggagctttgttccttgggttcttgggagcagcaggaagcactatgggcgcagcgtcaatgacgctgacggtacaggccagacaattattgtctggtatagtgcagcagcagaacaatttgctgagggctattgaggcgcaacagcatctgttgcaactcacagtctggggcatcaagcagctccaggcaagaatcctggctgtggaaagatacctaaaggatcaacagctcctggggatttggggttgctctggaaaactcatttgcaccactgctgtgccttggaatgctagttggagtaataaatctctggaacagatttggaatcacacgacctggatggagtgggacagagaaattaacaattacacaagcttaatacactccttaattgaagaatcgcaaaaccagcaagaaaagaatgaacaagaattattggaattagataaatgggcaagtttgtggaattggtttaacataacaaattggctgtggtatataaaattattcataatgatagtaggaggcttggtaggtttaagaatagtttttgctgtactttctatagtgaatagagttaggcagggatattcaccattatcgtttcagacccacctcccaaccccgaggggacccttgcgccttttccaaggcagccctgggtttgcgcagggacgcggctgctctgggcgtggttccgggaaacgcagcggcgccgaccctgggtctcgcacattcttcacgtccgttcgcagcgtcacccggatcttcgccgctacccttgtgggccccccggcgacgcttcctgctccgcccctaagtcgggaaggttccttgcggttcgcggcgtgccggacgtgacaaacggaagccgcacgtctcactagtaccctcgcagacggacagcgccagggagcaatggcagcgcgccgaccgcgatgggctgtggccaatagcggctgctcagcagggcgcgccgagagcagcggccgggaaggggcggtgcgggaggcggggtgtggggcggtagtgtgggccctgttcctgcccgcgcggtgttccgcattctgcaagcctccggagcgcacgtcggcagtcggctccctcgttgaccgaatcaccgacctctctccccagggggtacccagctgtctagagaattctagatcttgagacaaatggcagtattcatccacaattttaaaagaaaaggggggattggggggtacagtgcaggggaaagaatagtagacataatagcaacagacatacaaactaaagaattacaaaaacaaattacaaaaattcaaaattttcgggtttattacagggacagcagagatccactttggcgccggctcgaggggg

SEQ ID NO: 37 - protein, 394 aa, Artificial Sequence
  Synthetic Polypeptide
MKKPELTATSVEKFLIEKFDSVSDLMQLSEGEESRAFSFDVGGRGYVLRVNSCADGFYKDRYVYRHFASAALPIPEVLDIGEFSESLTYCISRRAQGVTLQDLPETELPAVLQPVAEAMDAIAAADLSQTSGFGPFGPQGIGQYTTWRDFICAIADPHVYHWQTVMDDTVSASVAQALDELMLWAEDCPEVRHLVHADFGSNNVLTDNGRITAVIDWSEAMFGDSQYEVANIFFWRPWLACMEQQTRYFERRHPELAGSPRLRAYMLRIGLDQLYQSLVDGNFDDAAWAQGRCLSYETEILTVEYGLLPIGKIVEKRIECTVYSVDNNGNIYTQPVAQWHDRGEQEVFEYCLEDGSLIRATKDHKFMTVDGQMLPIDEIFERELDLMRVDNLPN

SEQ ID NO: 38 - DNA, 8907 bp, Artificial Sequence
  Synthetic Polynucleotide
cccggggttattaatagtaatcaattacggggtcattagttcatagcccatatatggagttccgcgttacataacttacggtaaatggcccgcctggctgaccgcccaacgacccccgcccattgacgtcaataatgacgtatgttcccatagtaacgccaatagggactttccattgacgtcaatgggtggagtatttacggtaaactgcccacttggcagtacatcaagtgtatcatatgccaagtacgccccctattgacgtcaatgacggtaaatggcccgcctggcattatgcccagtacatgaccttatgggactttcctacttggcagtacatctacgtattagtcatcgctattaccatggtgatgcggttttggcagtacatcaatgggcgtggatagcggtttgactcacggggatttccaagtctccaccccattgacgtcaatgggagtttgttttggcaccaaaatcaacgggactttccaaaatgtcgtaacaactccgccccattgacgcaaatgggcggtaggcgtgtacggtgggaggtctatataagcagagctctctggctaactgtcgggatcaacaagtttgtacaaaaaagcaggctccgaattcaccggtgccgccaccatgattaagatcgctacgcggaagtacctggggaaacagaacgtctacgacataggtgtggagcgcgatcacaactttgctctgaaaaatggatttatcgccagcaactgcgacgcaatcgtccgatccggagccgggactgtcgggcgtacacaaatcgcccgcagaagcgcggccgtctggaccgatggctgtgtagaagtactcgccgatagtggaaaccgacgccccagcactcgtccgagggcaaaggaatagttaattaagaattcgacccagctttcttgtacaaagtggttggtaagcctatccctaaccctctcctcggtctcgattctacgtagtaatgagctagcagtctcgaggttaacgaattccgccccccccctaacgttactggccgaagccgcttggaataaggccggtgtgcgcttgtctatatgttattttccaccatattgccgtcttttggcaatgtgagggcccggaaacctggccctgtcttcttgacgagcattcctaggggtctttcccctctcgccaaaggaatgcaaggtctgttgaatgtcgtgaaggaagcagttcctctggaagcttcttgaagacaaacaacgtctgtagcgaccctttgcaggcagcggaaccccccacctggcgacaggtgcccctgcggccaaaagccacgtgtataagatacacctgcaaaggcggcacaaccccagtgccacgttgtgagttggatagttgtggaaagagtcaaatggctctcctcaagcgtattcaacaaggggctgaaggatgcccagaaggtaccccattgtatgggatctgatctggggcctcggtgcacatgctttacatgtgtttagtcgaggttaaaaaaacgtctaggccccccgaaccacggggacgtggttttcctttgaaaaacacgataataccatggtgagcaagggcgaggaggataacatggccatcatcaaggagttcatgcgcttcaaggtgcacatggagggctccgtgaacggccacgagttcgagatcgagggcgagggcgagggccgcccctacgagggcacccagaccgccaagctgaaggtgaccaagggtggccccctgcccttcgcctgggacatcctgtcccctcagttcatgtacggctccaaggcctacgtgaagcaccccgccgacatccccgactacttgaagctgtccttccccgagggcttcaagtgggagcgcgtgatgaacttcgaggacggcggcgtggtgaccgtgacccaggactcctccctgcaggacggcgagttcatctacaaggtgaagctgcgcggcaccaacttcccctccgacggccccgtaatgcagaagaagaccatgggctgggaggcctcctccgagcggatgtaccccgaggacggcgccctgaagggcgagatcaagcagaggctgaagctgaaggacggcggccactacgacgctgaggtcaagaccacctacaaggccaagaagcccgtgcagctgcccggcgcctacaacgtcaacatcaagttggacatcacctcccacaacgaggactacaccatcgtggaacagtacgaacgcgccgagggccgccactccaccggcggcatggacgagctgtacaagtaacaccggtggcgcgttaagtcgacaatcaacctctggattacaaaatttgtgaaagattgactggtattcttaactatgttgctccttttacgctatgtggatacgctgctttaatgcctttgtatcatgctattgcttcccgtatggctttcattttctcctccttgtataaatcctggttgctgtctctttatgaggagttgtggcccgttgtcaggcaacgtggcgtggtgtgcactgtgtttgctgacgcaacccccactggttggggcattgccaccacctgtcagctcctttccgggactttcgctttccccctccctattgccacggcggaactcatcgccgcctgccttgcccgctgctggacaggggctcggctgttgggcactgacaattccgtggtgttgtcggggaaatcatcgtcctttccttggctgctcgcctgtgttgccacctggattctgcgcgggacgtccttctgctacgtcccttcggccctcaatccagcggaccttccttcccgcggcctgctgccggctctgcggcctcttccgcgtcttcgccttcgccctcagacgagtcggatctccctttgggccgcctccccgcgtcgactttaagaccaatgacttacaaggcagctgtagatcttagccactttttaaaagaaaaggggggactggaagggctaattcactcccaacgaagacaagatctgctttttgcttgtactgggtctctctggttagaccagatctgagcctgggagctctctggctaactagggaacccactgcttaagcctcaataaagcttgccttgagtgcttcaagtagtgtgtgcccgtctgttgtgtgactctggtaactagagatccctcagacccttttagtcagtgtggaaaatctctagcagtacgtatagtagttcatgtcatcttattattcagtatttataacttgcaaagaaatgaatatcagagagtgagaggaacttgtttattgcagcttataatggttacaaataaagcaatagcatcacaaatttcacaaataaagcatttttttcactgcattctagttgtggtttgtccaaactcatcaatgtatcttatcatgtctggctctagctatcccgcccctaactccgcccatcccgcccctaactccgcccagttccgcccattctccgccccatggctgactaattttttttatttatgcagaggccgaggccgcctcggcctctgagctattccagaagtagtgaggaggcttttttggaggcctagggacgtacccaattcgccctatagtgagtcgtattacgcgcgctcactggccgtcgttttacaacgtcgtgactgggaaaaccctggcgttacccaacttaatcgccttgcagcacatccccctttcgccagctggcgtaatagcgaagaggcccgcaccgatcgcccttcccaacagttgcgcagcctgaatggcgaatgggacgcgccctgtagcggcgcattaagcgcggcgggtgtggtggttacgcgcagcgtgaccgctacacttgccagcgccctagcgcccgctcctttcgctttcttcccttcctttctcgccacgttcgccggctttccccgtcaagctctaaatcgggggctccctttagggttccgatttagtgctttacggcacctcgaccccaaaaaacttgattagggtgatggttcacgtagtgggccatcgccctgatagacggtttttcgccctttgacgttggagtccacgttctttaatagtggactcttgttccaaactggaacaacactcaaccctatctcggtctattcttttgatttataagggattttgccgatttcggcctattggttaaaaaatgagctgatttaacaaaaatttaacgcgaattttaacaaaatattaacgcttacaatttaggtggcacttttcggggaaatgtgcgcggaacccctatttgtttatttttctaaatacattcaaatatgtatccgctcatgagacaataaccctgataaatgcttcaataatattgaaaaaggaagagtatgagtattcaacatttccgtgtcgcccttattcccttttttgcggcattttgccttcctgtttttgctcacccagaaacgctggtgaaagtaaaagatgctgaagatcagttgggtgcacgagtgggttacatcgaactggatctcaacagcggtaagatccttgagagttttcgccccgaagaacgttttccaatgatgagcacttttaaagttctgctatgtggcgcggtattatcccgtattgacgccgggcaagagcaactcggtcgccgcatacactattctcagaatgacttggttgagtactcaccagtcacagaaaagcatcttacggatggcatgacagtaagagaattatgcagtgctgccataaccatgagtgataacactgcggccaacttacttctgacaacgatcggaggaccgaaggagctaaccgcttttttgcacaacatgggggatcatgtaactcgccttgatcgttgggaaccggagctgaatgaagccataccaaacgacgagcgtgacaccacgatgcctgtagcaatggcaacaacgttgcgcaaactattaactggcgaactacttactctagcttcccggcaacaattaatagactggatggaggcggataaagttgcaggaccacttctgcgctcggcccttccggctggctggtttattgctgataaatctggagccggtgagcgtgggtctcgcggtatcattgcagcactggggccagatggtaagccctcccgtatcgtagttatctacacgacggggagtcaggcaactatggatgaacgaaatagacagatcgctgagataggtgcctcactgattaagcattggtaactgtcagaccaagtttactcatatatactttagattgatttaaaacttcatttttaatttaaaaggatctaggtgaagatcctttttgataatctcatgaccaaaatcccttaacgtgagttttcgttccactgagcgtcagaccccgtagaaaagatcaaaggatcttcttgagatcctttttttctgcgcgtaatctgctgcttgcaaacaaaaaaaccaccgctaccagcggtggtttgtttgccggatcaagagctaccaactctttttccgaaggtaactggcttcagcagagcgcagataccaaatactgttcttctagtgtagccgtagttaggccaccacttcaagaactctgtagcaccgcctacatacctcgctctgctaatcctgttaccagtggctgctgccagtggcgataagtcgtgtcttaccgggttggactcaagacgatagttaccggataaggcgcagcggtcgggctgaacggggggttcgtgcacacagcccagcttggagcgaacgacctacaccgaactgagatacctacagcgtgagctatgagaaagcgccacgcttcccgaagggagaaaggcggacaggtatccggtaagcggcagggtcggaacaggagagcgcacgagggagcttccagggggaaacgcctggtatctttatagtcctgtcgggtttcgccacctctgacttgagcgtcgatttttgtgatgctcgtcaggggggcggagcctatggaaaaacgccagcaacgcggcctttttacggttcctggccttttgctggccttttgctcacatgttctttcctgcgttatcccctgattctgtggataaccgtattaccgcctttgagtgagctgataccgctcgccgcagccgaacgaccgagcgcagcgagtcagtgagcgaggaagcggaagagcgcccaatacgcaaaccgcctctccccgcgcgttggccgattcattaatgcagctggcacgacaggtttcccgactggaaagcgggcagtgagcgcaacgcaattaatgtgagttagctcactcattaggcaccccaggctttacactttatgcttccggctcgtatgttgtgtggaattgtgagcggataacaatttcacacaggaaacagctatgaccatgattacgccaagcgcgcaattaaccctcactaaagggaacaaaagctggagctgcaagcttaatgtagtcttatgcaatactcttgtagtcttgcaacatggtaacgatgagttagcaacatgccttacaaggagagaaaaagcaccgtgcatgccgattggtggaagtaaggtggtacgatcgtgccttattaggaaggcaacagacgggtctgacatggattggacgaaccactgaattgccgcattgcagagatattgtatttaagtgcctagctcgatacataaacgggtctctctggttagaccagatctgagcctgggagctctctggctaactagggaacccactgcttaagcctcaataaagcttgccttgagtgcttcaagtagtgtgtgcccgtctgttgtgtgactctggtaactagagatccctcagacccttttagtcagtgtggaaaatctctagcagtggcgcccgaacagggacttgaaagcgaaagggaaaccagaggagctctctcgacgcaggactcggcttgctgaagcgcgcacggcaagaggcgaggggcggcgactggtgagtacgccaaaaattttgactagcggaggctagaaggagagagatgggtgcgagagcgtcagtattaagcgggggagaattagatcgcgatgggaaaaaattcggttaaggccagggggaaagaaaaaatataaattaaaacatatagtatgggcaagcagggagctagaacgattcgcagttaatcctggcctgttagaaacatcagaaggctgtagacaaatactgggacagctacaaccatcccttcagacaggatcagaagaacttagatcattatataatacagtagcaaccctctattgtgtgcatcaaaggatagagataaaagacaccaaggaagctttagacaagatagaggaagagcaaaacaaaagtaagaccaccgcacagcaagcggccgctgatcttcagacctggaggaggagatatgagggacaattggagaagtgaattatataaatataaagtagtaaaaattgaaccattaggagtagcacccaccaaggcaaagagaagagtggtgcagagagaaaaaagagcagtgggaataggagctttgttccttgggttcttgggagcagcaggaagcactatgggcgcagcgtcaatgacgctgacggtacaggccagacaattattgtctggtatagtgcagcagcagaacaatttgctgagggctattgaggcgcaacagcatctgttgcaactcacagtctggggcatcaagcagctccaggcaagaatcctggctgtggaaagatacctaaaggatcaacagctcctggggatttggggttgctctggaaaactcatttgcaccactgctgtgccttggaatgctagttggagtaataaatctctggaacagatttggaatcacacgacctggatggagtgggacagagaaattaacaattacacaagcttaatacactccttaattgaagaatcgcaaaaccagcaagaaaagaatgaacaagaattattggaattagataaatgggcaagtttgtggaattggtttaacataacaaattggctgtggtatataaaattattcataatgatagtaggaggcttggtaggtttaagaatagtttttgctgtactttctatagtgaatagagttaggcagggatattcaccattatcgtttcagacccacctcccaaccccgaggggacccttgcgccttttccaaggcagccctgggtttgcgcagggacgcggctgctctgggcgtggttccgggaaacgcagcggcgccgaccctgggtctcgcacattcttcacgtccgttcgcagcgtcacccggatcttcgccgctacccttgtgggccccccggcgacgcttcctgctccgcccctaagtcgggaaggttccttgcggttcgcggcgtgccggacgtgacaaacggaagccgcacgtctcactagtaccctcgcagacggacagcgccagggagcaatggcagcgcgccgaccgcgatgggctgtggccaatagcggctgctcagcagggcgcgccgagagcagcggccgggaaggggcggtgcgggaggcggggtgtggggcggtagtgtgggccctgttcctgcccgcgcggtgttccgcattctgcaagcctccggagcgcacgtcggcagtcggctccctcgttgaccgaatcaccgacctctctccccagggggtacccagctgtctagagaattctagatcttgagacaaatggcagtattcatccacaattttaaaagaaaaggggggattggggggtacagtgcaggggaaagaatagtagacataatagcaacagacatacaaactaaagaattacaaaaacaaattacaaaaattcaaaattttcgggtttattacagggacagcagagatccactttggcgccggctcgaggggg

SEQ ID NO: 39 - protein, 85 aa, Artificial Sequence
  Synthetic Polypeptide
MIKIATRKYLGKQNVYDIGVERDHNFALKNGFIASNCDAIVRSGAGTVGRTQIARRSAAVWTDGCVEVLADSGNRRPSTRPRAKE

SEQ ID NO: 40 - DNA, 9261 bp, Artificial Sequence
  Synthetic Polynucleotide
cccggggttattaatagtaatcaattacggggtcattagttcatagcccatatatggagttccgcgttacataacttacggtaaatggcccgcctggctgaccgcccaacgacccccgcccattgacgtcaataatgacgtatgttcccatagtaacgccaatagggactttccattgacgtcaatgggtggagtatttacggtaaactgcccacttggcagtacatcaagtgtatcatatgccaagtacgccccctattgacgtcaatgacggtaaatggcccgcctggcattatgcccagtacatgaccttatgggactttcctacttggcagtacatctacgtattagtcatcgctattaccatggtgatgcggttttggcagtacatcaatgggcgtggatagcggtttgactcacggggatttccaagtctccaccccattgacgtcaatgggagtttgttttggcaccaaaatcaacgggactttccaaaatgtcgtaacaactccgccccattgacgcaaatgggcggtaggcgtgtacggtgggaggtctatataagcagagctctctggctaactgtcgggatcaacaagtttgtacaaaaaagcaggctccgaattcaccggtgccgccaccatgaaaacatttaacatttctcaacaggatctagaattagtagaagtagcgacagagaagattacaatgctttatgaggataataaacatcatgtgggagcggcaattcgtacgaaaacaggagaaatcatttcggcagtacatattgaagcgtatataggacgagtaactgtttgtgcagaagccattgcgattggtagtgcagtttcgaatggacaaaaggattttgacacgattgtagctgttagacacccttattctgacgaagtagatagaagtattcgagtggtaagtccttgtggtatgtgcctttcatacgagaccgagatcctgactgtcgagtacggattgcttcctatcggcaaaatcgtggagaagaggattgaatgtaccgtctattcagtcgataataatgggaacatctacacacagcccgtggctcaatggcacgacagaggagagcaggaagtttttgaatactgtctcgaggacggatccctcatccgcgctactaaagatcataagtttatgaccgtggacggccagatgctgccaattgacgaaatttttgaacgagagctggatctgatgagagtcgacaaccttccaaactgattaattaagaattcgacccagctttcttgtacaaagtggttggtaagcctatccctaaccctctcctcggtctcgattctacgtagtaatgagctagcagtctcgaggttaacgaattccgccccccccctaacgttactggccgaagccgcttggaataaggccggtgtgcgcttgtctatatgttattttccaccatattgccgtcttttggcaatgtgagggcccggaaacctggccctgtcttcttgacgagcattcctaggggtctttcccctctcgccaaaggaatgcaaggtctgttgaatgtcgtgaaggaagcagttcctctggaagcttcttgaagacaaacaacgtctgtagcgaccctttgcaggcagcggaaccccccacctggcgacaggtgcccctgcggccaaaagccacgtgtataagatacacctgcaaaggcggcacaaccccagtgccacgttgtgagttggatagttgtggaaagagtcaaatggctctcctcaagcgtattcaacaaggggctgaaggatgcccagaaggtaccccattgtatgggatctgatctggggcctcggtgcacatgctttacatgtgtttagtcgaggttaaaaaaacgtctaggccccccgaaccacggggacgtggttttcctttgaaaaacacgataataccatggccatgagcgagctgattaaggagaacatgcacatgaagctgtacatggagggcaccgtggacaaccatcacttcaagtgcacatccgagggcgaaggcaagccctacgagggcacccagaccatgagaatcaaggtggtcgagggcggccctctccccttcgccttcgacatcctggctactagcttcctctacggcagcaagaccttcatcaaccacacccagggcatccccgacttcttcaagcagtccttccctgagggcttcacatgggagagagtcaccacatacgaagacgggggcgtgctgaccgctacccaggacaccagcctccaggacggctgcctcatctacaacgtcaagatcagaggggtgaacttcacatccaacggccctgtgatgcagaagaaaacactcggctgggaggccttcaccgagacgctgtaccccgctgacggcggcctggaaggcagaaacgacatggccctgaagctcgtgggcgggagccatctgatcgcaaacatcaagaccacatatagatccaagaaacccgctaagaacctcaagatgcctggcgtctactatgtggactacagactggaaagaatcaaggaggccaacaacgagacctacgtcgagcagcacgaggtggcagtggccagatactgcgacctccctagcaaactggggcacaagcttaattaacaccggtggcgcgttaagtcgacaatcaacctctggattacaaaatttgtgaaagattgactggtattcttaactatgttgctccttttacgctatgtggatacgctgctttaatgcctttgtatcatgctattgcttcccgtatggctttcattttctcctccttgtataaatcctggttgctgtctctttatgaggagttgtggcccgttgtcaggcaacgtggcgtggtgtgcactgtgtttgctgacgcaacccccactggttggggcattgccaccacctgtcagctcctttccgggactttcgctttccccctccctattgccacggcggaactcatcgccgcctgccttgcccgctgctggacaggggctcggctgttgggcactgacaattccgtggtgttgtcggggaaatcatcgtcctttccttggctgctcgcctgtgttgccacctggattctgcgcgggacgtccttctgctacgtcccttcggccctcaatccagcggaccttccttcccgcggcctgctgccggctctgcggcctcttccgcgtcttcgccttcgccctcagacgagtcggatctccctttgggccgcctccccgcgtcgactttaagaccaatgacttacaaggcagctgtagatcttagccactttttaaaagaaaaggggggactggaagggctaattcactcccaacgaagacaagatctgctttttgcttgtactgggtctctctggttagaccagatctgagcctgggagctctctggctaactagggaacccactgcttaagcctcaataaagcttgccttgagtgcttcaagtagtgtgtgcccgtctgttgtgtgactctggtaactagagatccctcagacccttttagtcagtgtggaaaatctctagcagtacgtatagtagttcatgtcatcttattattcagtatttataacttgcaaagaaatgaatatcagagagtgagaggaacttgtttattgcagcttataatggttacaaataaagcaatagcatcacaaatttcacaaataaagcatttttttcactgcattctagttgtggtttgtccaaactcatcaatgtatcttatcatgtctggctctagctatcccgcccctaactccgcccatcccgcccctaactccgcccagttccgcccattctccgccccatggctgactaattttttttatttatgcagaggccgaggccgcctcggcctctgagctattccagaagtagtgaggaggcttttttggaggcctagggacgtacccaattcgccctatagtgagtcgtattacgcgcgctcactggccgtcgttttacaacgtcgtgactgggaaaaccctggcgttacccaacttaatcgccttgcagcacatccccctttcgccagctggcgtaatagcgaagaggcccgcaccgatcgcccttcccaacagttgcgcagcctgaatggcgaatgggacgcgccctgtagcggcgcattaagcgcggcgggtgtggtggttacgcgcagcgtgaccgctacacttgccagcgccctagcgcccgctcctttcgctttcttcccttcctttctcgccacgttcgccggctttccccgtcaagctctaaatcgggggctccctttagggttccgatttagtgctttacggcacctcgaccccaaaaaacttgattagggtgatggttcacgtagtgggccatcgccctgatagacggtttttcgccctttgacgttggagtccacgttctttaatagtggactcttgttccaaactggaacaacactcaaccctatctcggtctattcttttgatttataagggattttgccgatttcggcctattggttaaaaaatgagctgatttaacaaaaatttaacgcgaattttaacaaaatattaacgcttacaatttaggtggcacttttcggggaaatgtgcgcggaacccctatttgtttatttttctaaatacattcaaatatgtatccgctcatgagacaataaccctgataaatgcttcaataatattgaaaaaggaagagtatgagtattcaacatttccgtgtcgcccttattcccttttttgcggcattttgccttcctgtttttgctcacccagaaacgctggtgaaagtaaaagatgctgaagatcagttgggtgcacgagtgggttacatcgaactggatctcaacagcggtaagatccttgagagttttcgccccgaagaacgttttccaatgatgagcacttttaaagttctgctatgtggcgcggtattatcccgtattgacgccgggcaagagcaactcggtcgccgcatacactattctcagaatgacttggttgagtactcaccagtcacagaaaagcatcttacggatggcatgacagtaagagaattatgcagtgctgccataaccatgagtgataacactgcggccaacttacttctgacaacgatcggaggaccgaaggagctaaccgcttttttgcacaacatgggggatcatgtaactcgccttgatcgttgggaaccggagctgaatgaagccataccaaacgacgagcgtgacaccacgatgcctgtagcaatggcaacaacgttgcgcaaactattaactggcgaactacttactctagcttcccggcaacaattaatagactggatggaggcggataaagttgcaggaccacttctgcgctcggcccttccggctggctggtttattgctgataaatctggagccggtgagcgtgggtctcgcggtatcattgcagcactggggccagatggtaagccctcccgtatcgtagttatctacacgacggggagtcaggcaactatggatgaacgaaatagacagatcgctgagataggtgcctcactgattaagcattggtaactgtcagaccaagtttactcatatatactttagattgatttaaaacttcatttttaatttaaaaggatctaggtgaagatcctttttgataatctcatgaccaaaatcccttaacgtgagttttcgttccactgagcgtcagaccccgtagaaaagatcaaaggatcttcttgagatcctttttttctgcgcgtaatctgctgcttgcaaacaaaaaaaccaccgctaccagcggtggtttgtttgccggatcaagagctaccaactctttttccgaaggtaactggcttcagcagagcgcagataccaaatactgttcttctagtgtagccgtagttaggccaccacttcaagaactctgtagcaccgcctacatacctcgctctgctaatcctgttaccagtggctgctgccagtggcgataagtcgtgtcttaccgggttggactcaagacgatagttaccggataaggcgcagcggtcgggctgaacggggggttcgtgcacacagcccagcttggagcgaacgacctacaccgaactgagatacctacagcgtgagctatgagaaagcgccacgcttcccgaagggagaaaggcggacaggtatccggtaagcggcagggtcggaacaggagagcgcacgagggagcttccagggggaaacgcctggtatctttatagtcctgtcgggtttcgccacctctgacttgagcgtcgatttttgtgatgctcgtcaggggggcggagcctatggaaaaacgccagcaacgcggcctttttacggttcctggccttttgctggccttttgctcacatgttctttcctgcgttatcccctgattctgtggataaccgtattaccgcctttgagtgagctgataccgctcgccgcagccgaacgaccgagcgcagcgagtcagtgagcgaggaagcggaagagcgcccaatacgcaaaccgcctctccccgcgcgttggccgattcattaatgcagctggcacgacaggtttcccgactggaaagcgggcagtgagcgcaacgcaattaatgtgagttagctcactcattaggcaccccaggctttacactttatgcttccggctcgtatgttgtgtggaattgtgagcggataacaatttcacacaggaaacagctatgaccatgattacgccaagcgcgcaattaaccctcactaaagggaacaaaagctggagctgcaagcttaatgtagtcttatgcaatactcttgtagtcttgcaacatggtaacgatgagttagcaacatgccttacaaggagagaaaaagcaccgtgcatgccgattggtggaagtaaggtggtacgatcgtgccttattaggaaggcaacagacgggtctgacatggattggacgaaccactgaattgccgcattgcagagatattgtatttaagtgcctagctcgatacataaacgggtctctctggttagaccagatctgagcctgggagctctctggctaactagggaacccactgcttaagcctcaataaagcttgccttgagtgcttcaagtagtgtgtgcccgtctgttgtgtgactctggtaactagagatccctcagacccttttagtcagtgtggaaaatctctagcagtggcgcccgaacagggacttgaaagcgaaagggaaaccagaggagctctctcgacgcaggactcggcttgctgaagcgcgcacggcaagaggcgaggggcggcgactggtgagtacgccaaaaattttgactagcggaggctagaaggagagagatgggtgcgagagcgtcagtattaagcgggggagaattagatcgcgatgggaaaaaattcggttaaggccagggggaaagaaaaaatataaattaaaacatatagtatgggcaagcagggagctagaacgattcgcagttaatcctggcctgttagaaacatcagaaggctgtagacaaatactgggacagctacaaccatcccttcagacaggatcagaagaacttagatcattatataatacagtagcaaccctctattgtgtgcatcaaaggatagagataaaagacaccaaggaagctttagacaagatagaggaagagcaaaacaaaagtaagaccaccgcacagcaagcggccgctgatcttcagacctggaggaggagatatgagggacaattggagaagtgaattatataaatataaagtagtaaaaattgaaccattaggagtagcacccaccaaggcaaagagaagagtggtgcagagagaaaaaagagcagtgggaataggagctttgttccttgggttcttgggagcagcaggaagcactatgggcgcagcgtcaatgacgctgacggtacaggccagacaattattgtctggtatagtgcagcagcagaacaatttgctgagggctattgaggcgcaacagcatctgttgcaactcacagtctggggcatcaagcagctccaggcaagaatcctggctgtggaaagatacctaaaggatcaacagctcctggggatttggggttgctctggaaaactcatttgcaccactgctgtgccttggaatgctagttggagtaataaatctctggaacagatttggaatcacacgacctggatggagtgggacagagaaattaacaattacacaagcttaatacactccttaattgaagaatcgcaaaaccagcaagaaaagaatgaacaagaattattggaattagataaatgggcaagtttgtggaattggtttaacataacaaattggctgtggtatataaaattattcataatgatagtaggaggcttggtaggtttaagaatagtttttgctgtactttctatagtgaatagagttaggcagggatattcaccattatcgtttcagacccacctcccaaccccgaggggacccttgcgccttttccaaggcagccctgggtttgcgcagggacgcggctgctctgggcgtggttccgggaaacgcagcggcgccgaccctgggtctcgcacattcttcacgtccgttcgcagcgtcacccggatcttcgccgctacccttgtgggccccccggcgacgcttcctgctccgcccctaagtcgggaaggttccttgcggttcgcggcgtgccggacgtgacaaacggaagccgcacgtctcactagtaccctcgcagacggacagcgccagggagcaatggcagcgcgccgaccgcgatgggctgtggccaatagcggctgctcagcagggcgcgccgagagcagcggccgggaaggggcggtgcgggaggcggggtgtggggcggtagtgtgggccctgttcctgcccgcgcggtgttccgcattctgcaagcctccggagcgcacgtcggcagtcggctccctcgttgaccgaatcaccgacctctctccccagggggtacccagctgtctagagaattctagatcttgagacaaatggcagtattcatccacaattttaaaagaaaaggggggattggggggtacagtgcaggggaaagaatagtagacataatagcaacagacatacaaactaaagaattacaaaaacaaattacaaaaattcaaaattttcgggtttattacagggacagcagagatccactttggcgccggctcgaggggg

SEQ ID NO: 41 - protein, 204 aa, Artificial Sequence
  Synthetic Polypeptide
MKTFNISQQDLELVEVATEKITMLYEDNKHHVGAAIRTKTGEIISAVHIEAYIGRVTVCAEAIAIGSAVSNGQKDFDTIVAVRHPYSDEVDRSIRVVSPCGMCLSYETEILTVEYGLLPIGKIVEKRIECTVYSVDNNGNIYTQPVAQWHDRGEQEVFEYCLEDGSLIRATKDHKFMTVDGQMLPIDEIFERELDLMRVDNLPN

SEQ ID NO: 42 - DNA, 8873 bp, Artificial Sequence
  Synthetic Polynucleotide
cccggggttattaatagtaatcaattacggggtcattagttcatagcccatatatggagttccgcgttacataacttacggtaaatggcccgcctggctgaccgcccaacgacccccgcccattgacgtcaataatgacgtatgttcccatagtaacgccaatagggactttccattgacgtcaatgggtggagtatttacggtaaactgcccacttggcagtacatcaagtgtatcatatgccaagtacgccccctattgacgtcaatgacggtaaatggcccgcctggcattatgcccagtacatgaccttatgggactttcctacttggcagtacatctacgtattagtcatcgctattaccatggtgatgcggttttggcagtacatcaatgggcgtggatagcggtttgactcacggggatttccaagtctccaccccattgacgtcaatgggagtttgttttggcaccaaaatcaacgggactttccaaaatgtcgtaacaactccgccccattgacgcaaatgggcggtaggcgtgtacggtgggaggtctatataagcagagctctctggctaactgtcgggatcaacaagtttgtacaaaaaagcaggctccgaattcaccggtgccgccaccatgattaagatcgctacgcggaagtacctggggaaacagaacgtctacgacataggtgtggagcgcgatcacaactttgctctgaaaaatggatttatcgccagcaactgtagggagttgatttcagactatgcaccagattgttttgtgttaatagaaatgaatggcaagttagtcaaaactacgattgaagaactcattccactcaaatatacccgaaattaattattaagaattcgacccagctttcttgtacaaagtggttggtaagcctatccctaaccctctcctcggtctcgattctacgtagtaatgagctagcagtctcgaggttaacgaattccgccccccccctaacgttactggccgaagccgcttggaataaggccggtgtgcgcttgtctatatgttattttccaccatattgccgtcttttggcaatgtgagggcccggaaacctggccctgtcttcttgacgagcattcctaggggtctttcccctctcgccaaaggaatgcaaggtctgttgaatgtcgtgaaggaagcagttcctctggaagcttcttgaagacaaacaacgtctgtagcgaccctttgcaggcagcggaaccccccacctggcgacaggtgcccctgcggccaaaagccacgtgtataagatacacctgcaaaggcggcacaaccccagtgccacgttgtgagttggatagttgtggaaagagtcaaatggctctcctcaagcgtattcaacaaggggctgaaggatgcccagaaggtaccccattgtatgggatctgatctggggcctcggtgcacatgctttacatgtgtttagtcgaggttaaaaaaacgtctaggccccccgaaccacggggacgtggttttcctttgaaaaacacgataataccatggtgagcaagggcgaggaggataacatggccatcatcaaggagttcatgcgcttcaaggtgcacatggagggctccgtgaacggccacgagttcgagatcgagggcgagggcgagggccgcccctacgagggcacccagaccgccaagctgaaggtgaccaagggtggccccctgcccttcgcctgggacatcctgtcccctcagttcatgtacggctccaaggcctacgtgaagcaccccgccgacatccccgactacttgaagctgtccttccccgagggcttcaagtgggagcgcgtgatgaacttcgaggacggcggcgtggtgaccgtgacccaggactcctccctgcaggacggcgagttcatctacaaggtgaagctgcgcggcaccaacttcccctccgacggccccgtaatgcagaagaagaccatgggctgggaggcctcctccgagcggatgtaccccgaggacggcgccctgaagggcgagatcaagcagaggctgaagctgaaggacggcggccactacgacgctgaggtcaagaccacctacaaggccaagaagcccgtgcagctgcccggcgcctacaacgtcaacatcaagttggacatcacctcccacaacgaggactacaccatcgtggaacagtacgaacgcgccgagggccgccactccaccggcggcatggacgagctgtacaagtaacaccggtggcgcgttaagtcgacaatcaacctctggattacaaaatttgtgaaagattgactggtattcttaactatgttgctccttttacgctatgtggatacgctgctttaatgcctttgtatcatgctattgcttcccgtatggctttcattttctcctccttgtataaatcctggttgctgtctctttatgaggagttgtggcccgttgtcaggcaacgtggcgtggtgtgcactgtgtttgctgacgcaacccccactggttggggcattgccaccacctgtcagctcctttccgggactttcgctttccccctccctattgccacggcggaactcatcgccgcctgccttgcccgctgctggacaggggctcggctgttgggcactgacaattccgtggtgttgtcggggaaatcatcgtcctttccttggctgctcgcctgtgttgccacctggattctgcgcgggacgtccttctgctacgtcccttcggccctcaatccagcggaccttccttcccgcggcctgctgccggctctgcggcctcttccgcgtcttcgccttcgccctcagacgagtcggatctccctttgggccgcctccccgcgtcgactttaagaccaatgacttacaaggcagctgtagatcttagccactttttaaaagaaaaggggggactggaagggctaattcactcccaacgaagacaagatctgctttttgcttgtactgggtctctctggttagaccagatctgagcctgggagctctctggctaactagggaacccactgcttaagcctcaataaagcttgccttgagtgcttcaagtagtgtgtgcccgtctgttgtgtgactctggtaactagagatccctcagacccttttagtcagtgtggaaaatctctagcagtacgtatagtagttcatgtcatcttattattcagtatttataacttgcaaagaaatgaatatcagagagtgagaggaacttgtttattgcagcttataatggttacaaataaagcaatagcatcacaaatttcacaaataaagcatttttttcactgcattctagttgtggtttgtccaaactcatcaatgtatcttatcatgtctggctctagctatcccgcccctaactccgcccatcccgcccctaactccgcccagttccgcccattctccgccccatggctgactaattttttttatttatgcagaggccgaggccgcctcggcctctgagctattccagaagtagtgaggaggcttttttggaggcctagggacgtacccaattcgccctatagtgagtcgtattacgcgcgctcactggccgtcgttttacaacgtcgtgactgggaaaaccctggcgttacccaacttaatcgccttgcagcacatccccctttcgccagctggcgtaatagcgaagaggcccgcaccgatcgcccttcccaacagttgcgcagcctgaatggcgaatgggacgcgccctgtagcggcgcattaagcgcggcgggtgtggtggttacgcgcagcgtgaccgctacacttgccagcgccctagcgcccgctcctttcgctttcttcccttcctttctcgccacgttcgccggctttccccgtcaagctctaaatcgggggctccctttagggttccgatttagtgctttacggcacctcgaccccaaaaaacttgattagggtgatggttcacgtagtgggccatcgccctgatagacggtttttcgccctttgacgttggagtccacgttctttaatagtggactcttgttccaaactggaacaacactcaaccctatctcggtctattcttttgatttataagggattttgccgatttcggcctattggttaaaaaatgagctgatttaacaaaaatttaacgcgaattttaacaaaatattaacgcttacaatttaggtggcacttttcggggaaatgtgcgcggaacccctatttgtttatttttctaaatacattcaaatatgtatccgctcatgagacaataaccctgataaatgcttcaataatattgaaaaaggaagagtatgagtattcaacatttccgtgtcgcccttattcccttttttgcggcattttgccttcctgtttttgctcacccagaaacgctggtgaaagtaaaagatgctgaagatcagttgggtgcacgagtgggttacatcgaactggatctcaacagcggtaagatccttgagagttttcgccccgaagaacgttttccaatgatgagcacttttaaagttctgctatgtggcgcggtattatcccgtattgacgccgggcaagagcaactcggtcgccgcatacactattctcagaatgacttggttgagtactcaccagtcacagaaaagcatcttacggatggcatgacagtaagagaattatgcagtgctgccataaccatgagtgataacactgcggccaacttacttctgacaacgatcggaggaccgaaggagctaaccgcttttttgcacaacatgggggatcatgtaactcgccttgatcgttgggaaccggagctgaatgaagccataccaaacgacgagcgtgacaccacgatgcctgtagcaatggcaacaacgttgcgcaaactattaactggcgaactacttactctagcttcccggcaacaattaatagactggatggaggcggataaagttgcaggaccacttctgcgctcggcccttccggctggctggtttattgctgataaatctggagccggtgagcgtgggtctcgcggtatcattgcagcactggggccagatggtaagccctcccgtatcgtagttatctacacgacggggagtcaggcaactatggatgaacgaaatagacagatcgctgagataggtgcctcactgattaagcattggtaactgtcagaccaagtttactcatatatactttagattgatttaaaacttcatttttaatttaaaaggatctaggtgaagatcctttttgataatctcatgaccaaaatcccttaacgtgagttttcgttccactgagcgtcagaccccgtagaaaagatcaaaggatcttcttgagatcctttttttctgcgcgtaatctgctgcttgcaaacaaaaaaaccaccgctaccagcggtggtttgtttgccggatcaagagctaccaactctttttccgaaggtaactggcttcagcagagcgcagataccaaatactgttcttctagtgtagccgtagttaggccaccacttcaagaactctgtagcaccgcctacatacctcgctctgctaatcctgttaccagtggctgctgccagtggcgataagtcgtgtcttaccgggttggactcaagacgatagttaccggataaggcgcagcggtcgggctgaacggggggttcgtgcacacagcccagcttggagcgaacgacctacaccgaactgagatacctacagcgtgagctatgagaaagcgccacgcttcccgaagggagaaaggcggacaggtatccggtaagcggcagggtcggaacaggagagcgcacgagggagcttccagggggaaacgcctggtatctttatagtcctgtcgggtttcgccacctctgacttgagcgtcgatttttgtgatgctcgtcaggggggcggagcctatggaaaaacgccagcaacgcggcctttttacggttcctggccttttgctggccttttgctcacatgttctttcctgcgttatcccctgattctgtggataaccgtattaccgcctttgagtgagctgataccgctcgccgcagccgaacgaccgagcgcagcgagtcagtgagcgaggaagcggaagagcgcccaatacgcaaaccgcctctccccgcgcgttggccgattcattaatgcagctggcacgacaggtttcccgactggaaagcgggcagtgagcgcaacgcaattaatgtgagttagctcactcattaggcaccccaggctttacactttatgcttccggctcgtatgttgtgtggaattgtgagcggataacaatttcacacaggaaacagctatgaccatgattacgccaagcgcgcaattaaccctcactaaagggaacaaaagctggagctgcaagcttaatgtagtcttatgcaatactcttgtagtcttgcaacatggtaacgatgagttagcaacatgccttacaaggagagaaaaagcaccgtgcatgccgattggtggaagtaaggtggtacgatcgtgccttattaggaaggcaacagacgggtctgacatggattggacgaaccactgaattgccgcattgcagagatattgtatttaagtgcctagctcgatacataaacgggtctctctggttagaccagatctgagcctgggagctctctggctaactagggaacccactgcttaagcctcaataaagcttgccttgagtgcttcaagtagtgtgtgcccgtctgttgtgtgactctggtaactagagatccctcagacccttttagtcagtgtggaaaatctctagcagtggcgcccgaacagggacttgaaagcgaaagggaaaccagaggagctctctcgacgcaggactcggcttgctgaagcgcgcacggcaagaggcgaggggcggcgactggtgagtacgccaaaaattttgactagcggaggctagaaggagagagatgggtgcgagagcgtcagtattaagcgggggagaattagatcgcgatgggaaaaaattcggttaaggccagggggaaagaaaaaatataaattaaaacatatagtatgggcaagcagggagctagaacgattcgcagttaatcctggcctgttagaaacatcagaaggctgtagacaaatactgggacagctacaaccatcccttcagacaggatcagaagaacttagatcattatataatacagtagcaaccctctattgtgtgcatcaaaggatagagataaaagacaccaaggaagctttagacaagatagaggaagagcaaaacaaaagtaagaccaccgcacagcaagcggccgctgatcttcagacctggaggaggagatatgagggacaattggagaagtgaattatataaatataaagtagtaaaaattgaaccattaggagtagcacccaccaaggcaaagagaagagtggtgcagagagaaaaaagagcagtgggaataggagctttgttccttgggttcttgggagcagcaggaagcactatgggcgcagcgtcaatgacgctgacggtacaggccagacaattattgtctggtatagtgcagcagcagaacaatttgctgagggctattgaggcgcaacagcatctgttgcaactcacagtctggggcatcaagcagctccaggcaagaatcctggctgtggaaagatacctaaaggatcaacagctcctggggatttggggttgctctggaaaactcatttgcaccactgctgtgccttggaatgctagttggagtaataaatctctggaacagatttggaatcacacgacctggatggagtgggacagagaaattaacaattacacaagcttaatacactccttaattgaagaatcgcaaaaccagcaagaaaagaatgaacaagaattattggaattagataaatgggcaagtttgtggaattggtttaacataacaaattggctgtggtatataaaattattcataatgatagtaggaggcttggtaggtttaagaatagtttttgctgtactttctatagtgaatagagttaggcagggatattcaccattatcgtttcagacccacctcccaaccccgaggggacccttgcgccttttccaaggcagccctgggtttgcgcagggacgcggctgctctgggcgtggttccgggaaacgcagcggcgccgaccctgggtctcgcacattcttcacgtccgttcgcagcgtcacccggatcttcgccgctacccttgtgggccccccggcgacgcttcctgctccgcccctaagtcgggaaggttccttgcggttcgcggcgtgccggacgtgacaaacggaagccgcacgtctcactagtaccctcgcagacggacagcgccagggagcaatggcagcgcgccgaccgcgatgggctgtggccaatagcggctgctcagcagggcgcgccgagagcagcggccgggaaggggcggtgcgggaggcggggtgtggggcggtagtgtgggccctgttcctgcccgcgcggtgttccgcattctgcaagcctccggagcgcacgtcggcagtcggctccctcgttgaccgaatcaccgacctctctccccagggggtacccagctgtctagagaattctagatcttgagacaaatggcagtattcatccacaattttaaaagaaaaggggggattggggggtacagtgcaggggaaagaatagtagacataatagcaacagacatacaaactaaagaattacaaaaacaaattacaaaaattcaaaattttcgggtttattacagggacagcagagatccactttggcgccggctcgaggggg

SEQ ID NO: 43 - protein, 74 aa, Artificial Sequence
  Synthetic Polypeptide
MIKIATRKYLGKQNVYDIGVERDHNFALKNGFIASNCRELISDYAPDCFVLIEMNGKLVKTTIEELIPLKYTRN

SEQ ID NO: 44 - DNA, 9309 bp, Artificial Sequence
  Synthetic Polynucleotide
cccggggttattaatagtaatcaattacggggtcattagttcatagcccatatatggagttccgcgttacataacttacggtaaatggcccgcctggctgaccgcccaacgacccccgcccattgacgtcaataatgacgtatgttcccatagtaacgccaatagggactttccattgacgtcaatgggtggagtatttacggtaaactgcccacttggcagtacatcaagtgtatcatatgccaagtacgccccctattgacgtcaatgacggtaaatggcccgcctggcattatgcccagtacatgaccttatgggactttcctacttggcagtacatctacgtattagtcatcgctattaccatggtgatgcggttttggcagtacatcaatgggcgtggatagcggtttgactcacggggatttccaagtctccaccccattgacgtcaatgggagtttgttttggcaccaaaatcaacgggactttccaaaatgtcgtaacaactccgccccattgacgcaaatgggcggtaggcgtgtacggtgggaggtctatataagcagagctctctggctaactgtcgggatcaacaagtttgtacaaaaaagcaggctccgaattcaccggtgccaccatgaccgagtacaagcccacggtgcgcctcgccacccgcgacgacgtccccagggccgtacgcaccctcgccgccgcgttcgccgactaccccgccacgcgccacaccgtcgatccggaccgccacatcgagcgggtcaccgagctgcaagaactcttcctcacgcgcgtcgggctcgacatcggcaaggtgtgggtcgcggacgacggcgccgcggtggcggtctggaccacgccggagagcgtcgaagcgggggcggtgttcgccgagatcggcccgcgcatggccgagttgagcggttcccggctggccgcgcagcaacagatggaaggcctcctggcgccgcaccggcccaagtgcctttcatacgagaccgagatcctgactgtcgagtacggattgcttcctatcggcaaaatcgtggagaagaggattgaatgtaccgtctattcagtcgataataatgggaacatctacacacagcccgtggctcaatggcacgacagaggagagcaggaagtttttgaatactgtctcgaggacggatccctcatccgcgctactaaagatcataagtttatgaccgtggacggccagatgctgccaattgacgaaatttttgaacgagagctggatctgatgagagtcgacaaccttccaaactgattaattaagaattcgacccagctttcttgtacaaagtggttggtaagcctatccctaaccctctcctcggtctcgattctacgtagtaatgagctagcagtctcgaggttaacgaattccgccccccccctaacgttactggccgaagccgcttggaataaggccggtgtgcgcttgtctatatgttattttccaccatattgccgtcttttggcaatgtgagggcccggaaacctggccctgtcttcttgacgagcattcctaggggtctttcccctctcgccaaaggaatgcaaggtctgttgaatgtcgtgaaggaagcagttcctctggaagcttcttgaagacaaacaacgtctgtagcgaccctttgcaggcagcggaaccccccacctggcgacaggtgcccctgcggccaaaagccacgtgtataagatacacctgcaaaggcggcacaaccccagtgccacgttgtgagttggatagttgtggaaagagtcaaatggctctcctcaagcgtattcaacaaggggctgaaggatgcccagaaggtaccccattgtatgggatctgatctggggcctcggtgcacatgctttacatgtgtttagtcgaggttaaaaaaacgtctaggccccccgaaccacggggacgtggttttcctttgaaaaacacgataataccatggccatgagcgagctgattaaggagaacatgcacatgaagctgtacatggagggcaccgtggacaaccatcacttcaagtgcacatccgagggcgaaggcaagccctacgagggcacccagaccatgagaatcaaggtggtcgagggcggccctctccccttcgccttcgacatcctggctactagcttcctctacggcagcaagaccttcatcaaccacacccagggcatccccgacttcttcaagcagtccttccctgagggcttcacatgggagagagtcaccacatacgaagacgggggcgtgctgaccgctacccaggacaccagcctccaggacggctgcctcatctacaacgtcaagatcagaggggtgaacttcacatccaacggccctgtgatgcagaagaaaacactcggctgggaggccttcaccgagacgctgtaccccgctgacggcggcctggaaggcagaaacgacatggccctgaagctcgtgggcgggagccatctgatcgcaaacatcaagaccacatatagatccaagaaacccgctaagaacctcaagatgcctggcgtctactatgtggactacagactggaaagaatcaaggaggccaacaacgagacctacgtcgagcagcacgaggtggcagtggccagatactgcgacctccctagcaaactggggcacaagcttaattaacaccggtggcgcgttaagtcgacaatcaacctctggattacaaaatttgtgaaagattgactggtattcttaactatgttgctccttttacgctatgtggatacgctgctttaatgcctttgtatcatgctattgcttcccgtatggctttcattttctcctccttgtataaatcctggttgctgtctctttatgaggagttgtggcccgttgtcaggcaacgtggcgtggtgtgcactgtgtttgctgacgcaacccccactggttggggcattgccaccacctgtcagctcctttccgggactttcgctttccccctccctattgccacggcggaactcatcgccgcctgccttgcccgctgctggacaggggctcggctgttgggcactgacaattccgtggtgttgtcggggaaatcatcgtcctttccttggctgctcgcctgtgttgccacctggattctgcgcgggacgtccttctgctacgtcccttcggccctcaatccagcggaccttccttcccgcggcctgctgccggctctgcggcctcttccgcgtcttcgccttcgccctcagacgagtcggatctccctttgggccgcctccccgcgtcgactttaagaccaatgacttacaaggcagctgtagatcttagccactttttaaaagaaaaggggggactggaagggctaattcactcccaacgaagacaagatctgctttttgcttgtactgggtctctctggttagaccagatctgagcctgggagctctctggctaactagggaacccactgcttaagcctcaataaagcttgccttgagtgcttcaagtagtgtgtgcccgtctgttgtgtgactctggtaactagagatccctcagacccttttagtcagtgtggaaaatctctagcagtacgtatagtagttcatgtcatcttattattcagtatttataacttgcaaagaaatgaatatcagagagtgagaggaacttgtttattgcagcttataatggttacaaataaagcaatagcatcacaaatttcacaaataaagcatttttttcactgcattctagttgtggtttgtccaaactcatcaatgtatcttatcatgtctggctctagctatcccgcccctaactccgcccatcccgcccctaactccgcccagttccgcccattctccgccccatggctgactaattttttttatttatgcagaggccgaggccgcctcggcctctgagctattccagaagtagtgaggaggcttttttggaggcctagggacgtacccaattcgccctatagtgagtcgtattacgcgcgctcactggccgtcgttttacaacgtcgtgactgggaaaaccctggcgttacccaacttaatcgccttgcagcacatccccctttcgccagctggcgtaatagcgaagaggcccgcaccgatcgcccttcccaacagttgcgcagcctgaatggcgaatgggacgcgccctgtagcggcgcattaagcgcggcgggtgtggtggttacgcgcagcgtgaccgctacacttgccagcgccctagcgcccgctcctttcgctttcttcccttcctttctcgccacgttcgccggctttccccgtcaagctctaaatcgggggctccctttagggttccgatttagtgctttacggcacctcgaccccaaaaaacttgattagggtgatggttcacgtagtgggccatcgccctgatagacggtttttcgccctttgacgttggagtccacgttctttaatagtggactcttgttccaaactggaacaacactcaaccctatctcggtctattcttttgatttataagggattttgccgatttcggcctattggttaaaaaatgagctgatttaacaaaaatttaacgcgaattttaacaaaatattaacgcttacaatttaggtggcacttttcggggaaatgtgcgcggaacccctatttgtttatttttctaaatacattcaaatatgtatccgctcatgagacaataaccctgataaatgcttcaataatattgaaaaaggaagagtatgagtattcaacatttccgtgtcgcccttattcccttttttgcggcattttgccttcctgtttttgctcacccagaaacgctggtgaaagtaaaagatgctgaagatcagttgggtgcacgagtgggttacatcgaactggatctcaacagcggtaagatccttgagagttttcgccccgaagaacgttttccaatgatgagcacttttaaagttctgctatgtggcgcggtattatcccgtattgacgccgggcaagagcaactcggtcgccgcatacactattctcagaatgacttggttgagtactcaccagtcacagaaaagcatcttacggatggcatgacagtaagagaattatgcagtgctgccataaccatgagtgataacactgcggccaacttacttctgacaacgatcggaggaccgaaggagctaaccgcttttttgcacaacatgggggatcatgtaactcgccttgatcgttgggaaccggagctgaatgaagccataccaaacgacgagcgtgacaccacgatgcctgtagcaatggcaacaacgttgcgcaaactattaactggcgaactacttactctagcttcccggcaacaattaatagactggatggaggcggataaagttgcaggaccacttctgcgctcggcccttccggctggctggtttattgctgataaatctggagccggtgagcgtgggtctcgcggtatcattgcagcactggggccagatggtaagccctcccgtatcgtagttatctacacgacggggagtcaggcaactatggatgaacgaaatagacagatcgctgagataggtgcctcactgattaagcattggtaactgtcagaccaagtttactcatatatactttagattgatttaaaacttcatttttaatttaaaaggatctaggtgaagatcctttttgataatctcatgaccaaaatcccttaacgtgagttttcgttccactgagcgtcagaccccgtagaaaagatcaaaggatcttcttgagatcctttttttctgcgcgtaatctgctgcttgcaaacaaaaaaaccaccgctaccagcggtggtttgtttgccggatcaagagctaccaactctttttccgaaggtaactggcttcagcagagcgcagataccaaatactgttcttctagtgtagccgtagttaggccaccacttcaagaactctgtagcaccgcctacatacctcgctctgctaatcctgttaccagtggctgctgccagtggcgataagtcgtgtcttaccgggttggactcaagacgatagttaccggataaggcgcagcggtcgggctgaacggggggttcgtgcacacagcccagcttggagcgaacgacctacaccgaactgagatacctacagcgtgagctatgagaaagcgccacgcttcccgaagggagaaaggcggacaggtatccggtaagcggcagggtcggaacaggagagcgcacgagggagcttccagggggaaacgcctggtatctttatagtcctgtcgggtttcgccacctctgacttgagcgtcgatttttgtgatgctcgtcaggggggcggagcctatggaaaaacgccagcaacgcggcctttttacggttcctggccttttgctggccttttgctcacatgttctttcctgcgttatcccctgattctgtggataaccgtattaccgcctttgagtgagctgataccgctcgccgcagccgaacgaccgagcgcagcgagtcagtgagcgaggaagcggaagagcgcccaatacgcaaaccgcctctccccgcgcgttggccgattcattaatgcagctggcacgacaggtttcccgactggaaagcgggcagtgagcgcaacgcaattaatgtgagttagctcactcattaggcaccccaggctttacactttatgcttccggctcgtatgttgtgtggaattgtgagcggataacaatttcacacaggaaacagctatgaccatgattacgccaagcgcgcaattaaccctcactaaagggaacaaaagctggagctgcaagcttaatgtagtcttatgcaatactcttgtagtcttgcaacatggtaacgatgagttagcaacatgccttacaaggagagaaaaagcaccgtgcatgccgattggtggaagtaaggtggtacgatcgtgccttattaggaaggcaacagacgggtctgacatggattggacgaaccactgaattgccgcattgcagagatattgtatttaagtgcctagctcgatacataaacgggtctctctggttagaccagatctgagcctgggagctctctggctaactagggaacccactgcttaagcctcaataaagcttgccttgagtgcttcaagtagtgtgtgcccgtctgttgtgtgactctggtaactagagatccctcagacccttttagtcagtgtggaaaatctctagcagtggcgcccgaacagggacttgaaagcgaaagggaaaccagaggagctctctcgacgcaggactcggcttgctgaagcgcgcacggcaagaggcgaggggcggcgactggtgagtacgccaaaaattttgactagcggaggctagaaggagagagatgggtgcgagagcgtcagtattaagcgggggagaattagatcgcgatgggaaaaaattcggttaaggccagggggaaagaaaaaatataaattaaaacatatagtatgggcaagcagggagctagaacgattcgcagttaatcctggcctgttagaaacatcagaaggctgtagacaaatactgggacagctacaaccatcccttcagacaggatcagaagaacttagatcattatataatacagtagcaaccctctattgtgtgcatcaaaggatagagataaaagacaccaaggaagctttagacaagatagaggaagagcaaaacaaaagtaagaccaccgcacagcaagcggccgctgatcttcagacctggaggaggagatatgagggacaattggagaagtgaattatataaatataaagtagtaaaaattgaaccattaggagtagcacccaccaaggcaaagagaagagtggtgcagagagaaaaaagagcagtgggaataggagctttgttccttgggttcttgggagcagcaggaagcactatgggcgcagcgtcaatgacgctgacggtacaggccagacaattattgtctggtatagtgcagcagcagaacaatttgctgagggctattgaggcgcaacagcatctgttgcaactcacagtctggggcatcaagcagctccaggcaagaatcctggctgtggaaagatacctaaaggatcaacagctcctggggatttggggttgctctggaaaactcatttgcaccactgctgtgccttggaatgctagttggagtaataaatctctggaacagatttggaatcacacgacctggatggagtgggacagagaaattaacaattacacaagcttaatacactccttaattgaagaatcgcaaaaccagcaagaaaagaatgaacaagaattattggaattagataaatgggcaagtttgtggaattggtttaacataacaaattggctgtggtatataaaattattcataatgatagtaggaggcttggtaggtttaagaatagtttttgctgtactttctatagtgaatagagttaggcagggatattcaccattatcgtttcagacccacctcccaaccccgaggggacccttgcgccttttccaaggcagccctgggtttgcgcagggacgcggctgctctgggcgtggttccgggaaacgcagcggcgccgaccctgggtctcgcacattcttcacgtccgttcgcagcgtcacccggatcttcgccgctacccttgtgggccccccggcgacgcttcctgctccgcccctaagtcgggaaggttccttgcggttcgcggcgtgccggacgtgacaaacggaagccgcacgtctcactagtaccctcgcagacggacagcgccagggagcaatggcagcgcgccgaccgcgatgggctgtggccaatagcggctgctcagcagggcgcgccgagagcagcggccgggaaggggcggtgcgggaggcggggtgtggggcggtagtgtgggccctgttcctgcccgcgcggtgttccgcattctgcaagcctccggagcgcacgtcggcagtcggctccctcgttgaccgaatcaccgacctctctccccagggggtacccagctgtctagagaattctagatcttgagacaaatggcagtattcatccacaattttaaaagaaaaggggggattggggggtacagtgcaggggaaagaatagtagacataatagcaacagacatacaaactaaagaattacaaaaacaaattacaaaaattcaaaattttcgggtttattacagggacagcagagatccactttggcgccggctcgaggggg

SEQ ID NO: 45 - protein, 221 aa, Artificial Sequence
  Synthetic Polypeptide
MTEYKPTVRLATRDDVPRAVRTLAAAFADYPATRHTVDPDRHIERVTELQELFLTRVGLDIGKVWVADDGAAVAVWTTPESVEAGAVFAEIGPRMAELSGSRLAAQQQMEGLLAPHRPKCLSYETEILTVEYGLLPIGKIVEKRIECTVYSVDNNGNIYTQPVAQWHDRGEQEVFEYCLEDGSLIRATKDHKFMTVDGQMLPIDEIFERELDLMRVDNLPN

SEQ ID NO: 46 - DNA, 9003 bp, Artificial Sequence
  Synthetic Polynucleotide
cccggggttattaatagtaatcaattacggggtcattagttcatagcccatatatggagttccgcgttacataacttacggtaaatggcccgcctggctgaccgcccaacgacccccgcccattgacgtcaataatgacgtatgttcccatagtaacgccaatagggactttccattgacgtcaatgggtggagtatttacggtaaactgcccacttggcagtacatcaagtgtatcatatgccaagtacgccccctattgacgtcaatgacggtaaatggcccgcctggcattatgcccagtacatgaccttatgggactttcctacttggcagtacatctacgtattagtcatcgctattaccatggtgatgcggttttggcagtacatcaatgggcgtggatagcggtttgactcacggggatttccaagtctccaccccattgacgtcaatgggagtttgttttggcaccaaaatcaacgggactttccaaaatgtcgtaacaactccgccccattgacgcaaatgggcggtaggcgtgtacggtgggaggtctatataagcagagctctctggctaactgtcgggatcaacaagtttgtacaaaaaagcaggctccgaattcaccggtgccgccaccatgattaagatcgctacgcggaagtacctggggaaacagaacgtctacgacataggtgtggagcgcgatcacaactttgctctgaaaaatggatttatcgccagcaactgcgagcccgcgtggttcctggccaccgtcggcgtctcgcccgaccaccagggcaagggtctgggcagcgccgtcgtgctccccggagtggaggcggccgagcgcgccggggtgcccgccttcctggagacctccgcgccccgcaacctccccttctacgagcggctcggcttcaccgtcaccgccgacgtcgaggtgcccgaaggaccgcgcacctggtgcatgacccgcaagcccggtgcctgattaattaagaattcgacccagctttcttgtacaaagtggttggtaagcctatccctaaccctctcctcggtctcgattctacgtagtaatgagctagcagtctcgaggttaacgaattccgccccccccctaacgttactggccgaagccgcttggaataaggccggtgtgcgcttgtctatatgttattttccaccatattgccgtcttttggcaatgtgagggcccggaaacctggccctgtcttcttgacgagcattcctaggggtctttcccctctcgccaaaggaatgcaaggtctgttgaatgtcgtgaaggaagcagttcctctggaagcttcttgaagacaaacaacgtctgtagcgaccctttgcaggcagcggaaccccccacctggcgacaggtgcccctgcggccaaaagccacgtgtataagatacacctgcaaaggcggcacaaccccagtgccacgttgtgagttggatagttgtggaaagagtcaaatggctctcctcaagcgtattcaacaaggggctgaaggatgcccagaaggtaccccattgtatgggatctgatctggggcctcggtgcacatgctttacatgtgtttagtcgaggttaaaaaaacgtctaggccccccgaaccacggggacgtggttttcctttgaaaaacacgataataccatggtgagcaagggcgaggaggataacatggccatcatcaaggagttcatgcgcttcaaggtgcacatggagggctccgtgaacggccacgagttcgagatcgagggcgagggcgagggccgcccctacgagggcacccagaccgccaagctgaaggtgaccaagggtggccccctgcccttcgcctgggacatcctgtcccctcagttcatgtacggctccaaggcctacgtgaagcaccccgccgacatccccgactacttgaagctgtccttccccgagggcttcaagtgggagcgcgtgatgaacttcgaggacggcggcgtggtgaccgtgacccaggactcctccctgcaggacggcgagttcatctacaaggtgaagctgcgcggcaccaacttcccctccgacggccccgtaatgcagaagaagaccatgggctgggaggcctcctccgagcggatgtaccccgaggacggcgccctgaagggcgagatcaagcagaggctgaagctgaaggacggcggccactacgacgctgaggtcaagaccacctacaaggccaagaagcccgtgcagctgcccggcgcctacaacgtcaacatcaagttggacatcacctcccacaacgaggactacaccatcgtggaacagtacgaacgcgccgagggccgccactccaccggcggcatggacgagctgtacaagtaacaccggtggcgcgttaagtcgacaatcaacctctggattacaaaatttgtgaaagattgactggtattcttaactatgttgctccttttacgctatgtggatacgctgctttaatgcctttgtatcatgctattgcttcccgtatggctttcattttctcctccttgtataaatcctggttgctgtctctttatgaggagttgtggcccgttgtcaggcaacgtggcgtggtgtgcactgtgtttgctgacgcaacccccactggttggggcattgccaccacctgtcagctcctttccgggactttcgctttccccctccctattgccacggcggaactcatcgccgcctgccttgcccgctgctggacaggggctcggctgttgggcactgacaattccgtggtgttgtcggggaaatcatcgtcctttccttggctgctcgcctgtgttgccacctggattctgcgcgggacgtccttctgctacgtcccttcggccctcaatccagcggaccttccttcccgcggcctgctgccggctctgcggcctcttccgcgtcttcgccttcgccctcagacgagtcggatctccctttgggccgcctccccgcgtcgactttaagaccaatgacttacaaggcagctgtagatcttagccactttttaaaagaaaaggggggactggaagggctaattcactcccaacgaagacaagatctgctttttgcttgtactgggtctctctggttagaccagatctgagcctgggagctctctggctaactagggaacccactgcttaagcctcaataaagcttgccttgagtgcttcaagtagtgtgtgcccgtctgttgtgtgactctggtaactagagatccctcagacccttttagtcagtgtggaaaatctctagcagtacgtatagtagttcatgtcatcttattattcagtatttataacttgcaaagaaatgaatatcagagagtgagaggaacttgtttattgcagcttataatggttacaaataaagcaatagcatcacaaatttcacaaataaagcatttttttcactgcattctagttgtggtttgtccaaactcatcaatgtatcttatcatgtctggctctagctatcccgcccctaactccgcccatcccgcccctaactccgcccagttccgcccattctccgccccatggctgactaattttttttatttatgcagaggccgaggccgcctcggcctctgagctattccagaagtagtgaggaggcttttttggaggcctagggacgtacccaattcgccctatagtgagtcgtattacgcgcgctcactggccgtcgttttacaacgtcgtgactgggaaaaccctggcgttacccaacttaatcgccttgcagcacatccccctttcgccagctggcgtaatagcgaagaggcccgcaccgatcgcccttcccaacagttgcgcagcctgaatggcgaatgggacgcgccctgtagcggcgcattaagcgcggcgggtgtggtggttacgcgcagcgtgaccgctacacttgccagcgccctagcgcccgctcctttcgctttcttcccttcctttctcgccacgttcgccggctttccccgtcaagctctaaatcgggggctccctttagggttccgatttagtgctttacggcacctcgaccccaaaaaacttgattagggtgatggttcacgtagtgggccatcgccctgatagacggtttttcgccctttgacgttggagtccacgttctttaatagtggactcttgttccaaactggaacaacactcaaccctatctcggtctattcttttgatttataagggattttgccgatttcggcctattggttaaaaaatgagctgatttaacaaaaatttaacgcgaattttaacaaaatattaacgcttacaatttaggtggcacttttcggggaaatgtgcgcggaacccctatttgtttatttttctaaatacattcaaatatgtatccgctcatgagacaataaccctgataaatgcttcaataatattgaaaaaggaagagtatgagtattcaacatttccgtgtcgcccttattcccttttttgcggcattttgccttcctgtttttgctcacccagaaacgctggtgaaagtaaaagatgctgaagatcagttgggtgcacgagtgggttacatcgaactggatctcaacagcggtaagatccttgagagttttcgccccgaagaacgttttccaatgatgagcacttttaaagttctgctatgtggcgcggtattatcccgtattgacgccgggcaagagcaactcggtcgccgcatacactattctcagaatgacttggttgagtactcaccagtcacagaaaagcatcttacggatggcatgacagtaagagaattatgcagtgctgccataaccatgagtgataacactgcggccaacttacttctgacaacgatcggaggaccgaaggagctaaccgcttttttgcacaacatgggggatcatgtaactcgccttgatcgttgggaaccggagctgaatgaagccataccaaacgacgagcgtgacaccacgatgcctgtagcaatggcaacaacgttgcgcaaactattaactggcgaactacttactctagcttcccggcaacaattaatagactggatggaggcggataaagttgcaggaccacttctgcgctcggcccttccggctggctggtttattgctgataaatctggagccggtgagcgtgggtctcgcggtatcattgcagcactggggccagatggtaagccctcccgtatcgtagttatctacacgacggggagtcaggcaactatggatgaacgaaatagacagatcgctgagataggtgcctcactgattaagcattggtaactgtcagaccaagtttactcatatatactttagattgatttaaaacttcatttttaatttaaaaggatctaggtgaagatcctttttgataatctcatgaccaaaatcccttaacgtgagttttcgttccactgagcgtcagaccccgtagaaaagatcaaaggatcttcttgagatcctttttttctgcgcgtaatctgctgcttgcaaacaaaaaaaccaccgctaccagcggtggtttgtttgccggatcaagagctaccaactctttttccgaaggtaactggcttcagcagagcgcagataccaaatactgttcttctagtgtagccgtagttaggccaccacttcaagaactctgtagcaccgcctacatacctcgctctgctaatcctgttaccagtggctgctgccagtggcgataagtcgtgtcttaccgggttggactcaagacgatagttaccggataaggcgcagcggtcgggctgaacggggggttcgtgcacacagcccagcttggagcgaacgacctacaccgaactgagatacctacagcgtgagctatgagaaagcgccacgcttcccgaagggagaaaggcggacaggtatccggtaagcggcagggtcggaacaggagagcgcacgagggagcttccagggggaaacgcctggtatctttatagtcctgtcgggtttcgccacctctgacttgagcgtcgatttttgtgatgctcgtcaggggggcggagcctatggaaaaacgccagcaacgcggcctttttacggttcctggccttttgctggccttttgctcacatgttctttcctgcgttatcccctgattctgtggataaccgtattaccgcctttgagtgagctgataccgctcgccgcagccgaacgaccgagcgcagcgagtcagtgagcgaggaagcggaagagcgcccaatacgcaaaccgcctctccccgcgcgttggccgattcattaatgcagctggcacgacaggtttcccgactggaaagcgggcagtgagcgcaacgcaattaatgtgagttagctcactcattaggcaccccaggctttacactttatgcttccggctcgtatgttgtgtggaattgtgagcggataacaatttcacacaggaaacagctatgaccatgattacgccaagcgcgcaattaaccctcactaaagggaacaaaagctggagctgcaagcttaatgtagtcttatgcaatactcttgtagtcttgcaacatggtaacgatgagttagcaacatgccttacaaggagagaaaaagcaccgtgcatgccgattggtggaagtaaggtggtacgatcgtgccttattaggaaggcaacagacgggtctgacatggattggacgaaccactgaattgccgcattgcagagatattgtatttaagtgcctagctcgatacataaacgggtctctctggttagaccagatctgagcctgggagctctctggctaactagggaacccactgcttaagcctcaataaagcttgccttgagtgcttcaagtagtgtgtgcccgtctgttgtgtgactctggtaactagagatccctcagacccttttagtcagtgtggaaaatctctagcagtggcgcccgaacagggacttgaaagcgaaagggaaaccagaggagctctctcgacgcaggactcggcttgctgaagcgcgcacggcaagaggcgaggggcggcgactggtgagtacgccaaaaattttgactagcggaggctagaaggagagagatgggtgcgagagcgtcagtattaagcgggggagaattagatcgcgatgggaaaaaattcggttaaggccagggggaaagaaaaaatataaattaaaacatatagtatgggcaagcagggagctagaacgattcgcagttaatcctggcctgttagaaacatcagaaggctgtagacaaatactgggacagctacaaccatcccttcagacaggatcagaagaacttagatcattatataatacagtagcaaccctctattgtgtgcatcaaaggatagagataaaagacaccaaggaagctttagacaagatagaggaagagcaaaacaaaagtaagaccaccgcacagcaagcggccgctgatcttcagacctggaggaggagatatgagggacaattggagaagtgaattatataaatataaagtagtaaaaattgaaccattaggagtagcacccaccaaggcaaagagaagagtggtgcagagagaaaaaagagcagtgggaataggagctttgttccttgggttcttgggagcagcaggaagcactatgggcgcagcgtcaatgacgctgacggtacaggccagacaattattgtctggtatagtgcagcagcagaacaatttgctgagggctattgaggcgcaacagcatctgttgcaactcacagtctggggcatcaagcagctccaggcaagaatcctggctgtggaaagatacctaaaggatcaacagctcctggggatttggggttgctctggaaaactcatttgcaccactgctgtgccttggaatgctagttggagtaataaatctctggaacagatttggaatcacacgacctggatggagtgggacagagaaattaacaattacacaagcttaatacactccttaattgaagaatcgcaaaaccagcaagaaaagaatgaacaagaattattggaattagataaatgggcaagtttgtggaattggtttaacataacaaattggctgtggtatataaaattattcataatgatagtaggaggcttggtaggtttaagaatagtttttgctgtactttctatagtgaatagagttaggcagggatattcaccattatcgtttcagacccacctcccaaccccgaggggacccttgcgccttttccaaggcagccctgggtttgcgcagggacgcggctgctctgggcgtggttccgggaaacgcagcggcgccgaccctgggtctcgcacattcttcacgtccgttcgcagcgtcacccggatcttcgccgctacccttgtgggccccccggcgacgcttcctgctccgcccctaagtcgggaaggttccttgcggttcgcggcgtgccggacgtgacaaacggaagccgcacgtctcactagtaccctcgcagacggacagcgccagggagcaatggcagcgcgccgaccgcgatgggctgtggccaatagcggctgctcagcagggcgcgccgagagcagcggccgggaaggggcggtgcgggaggcggggtgtggggcggtagtgtgggccctgttcctgcccgcgcggtgttccgcattctgcaagcctccggagcgcacgtcggcagtcggctccctcgttgaccgaatcaccgacctctctccccagggggtacccagctgtctagagaattctagatcttgagacaaatggcagtattcatccacaattttaaaagaaaaggggggattggggggtacagtgcaggggaaagaatagtagacataatagcaacagacatacaaactaaagaattacaaaaacaaattacaaaaattcaaaattttcgggtttattacagggacagcagagatccactttggcgccggctcgaggggg

SEQ ID NO: 47 - protein, 117 aa, Artificial Sequence
  Synthetic Polypeptide
MIKIATRKYLGKQNVYDIGVERDHNFALKNGFIASNCEPAWFLATVGVSPDHQGKGLGSAVVLPGVEAAERAGVPAFLETSAPRNLPFYERLGFTVTADVEVPEGPRTWCMTRKPGA

SEQ ID NO: 48 - DNA, 9264 bp, Artificial Sequence
  Synthetic Polynucleotide
cccggggttattaatagtaatcaattacggggtcattagttcatagcccatatatggagttccgcgttacataacttacggtaaatggcccgcctggctgaccgcccaacgacccccgcccattgacgtcaataatgacgtatgttcccatagtaacgccaatagggactttccattgacgtcaatgggtggagtatttacggtaaactgcccacttggcagtacatcaagtgtatcatatgccaagtacgccccctattgacgtcaatgacggtaaatggcccgcctggcattatgcccagtacatgaccttatgggactttcctacttggcagtacatctacgtattagtcatcgctattaccatggtgatgcggttttggcagtacatcaatgggcgtggatagcggtttgactcacggggatttccaagtctccaccccattgacgtcaatgggagtttgttttggcaccaaaatcaacgggactttccaaaatgtcgtaacaactccgccccattgacgcaaatgggcggtaggcgtgtacggtgggaggtctatataagcagagctctctggctaactgtcgggatcaacaagtttgtacaaaaaagcaggctccgaattcaccggtgccaccatgaccgagtacaagcccacggtgcgcctcgccacccgcgacgacgtccccagggccgtacgcaccctcgccgccgcgttcgccgactaccccgccacgcgccacaccgtcgatccggaccgccacatcgagcgggtcaccgagctgcaagaactcttcctcacgcgcgtcgggctcgacatcggcaaggtgtgggtcgcggacgacggcgccgcggtggcggtctggaccacgccggagagcgtcgaagcgggggcggtgttcgccgagatcggcccgcgcatggccgagttgagcggttgtatcagtggcgactccctgatctcactcgcaagcactggaaagcgagttagcatcaaggacttgctggacgaaaaggatttcgaaatttgggcaatcaatgagcagaccatgaaactggagtctgcaaaggtgtcccgggtgttttgcacgggtaagaagcttgtttatatccttaaaactagactgggccggacgatcaaagccaccgcgaaccacagattcttgacaatcgacgggtggaaacggctggacgaactgagcttgaaggagcacatcgcccttcctcggaagctcgagtcatcttccctgcagctgtgattaattaagaattcgacccagctttcttgtacaaagtggttggtaagcctatccctaaccctctcctcggtctcgattctacgtagtaatgagctagcagtctcgaggttaacgaattccgccccccccctaacgttactggccgaagccgcttggaataaggccggtgtgcgcttgtctatatgttattttccaccatattgccgtcttttggcaatgtgagggcccggaaacctggccctgtcttcttgacgagcattcctaggggtctttcccctctcgccaaaggaatgcaaggtctgttgaatgtcgtgaaggaagcagttcctctggaagcttcttgaagacaaacaacgtctgtagcgaccctttgcaggcagcggaaccccccacctggcgacaggtgcccctgcggccaaaagccacgtgtataagatacacctgcaaaggcggcacaaccccagtgccacgttgtgagttggatagttgtggaaagagtcaaatggctctcctcaagcgtattcaacaaggggctgaaggatgcccagaaggtaccccattgtatgggatctgatctggggcctcggtgcacatgctttacatgtgtttagtcgaggttaaaaaaacgtctaggccccccgaaccacggggacgtggttttcctttgaaaaacacgataataccatggccatgagcgagctgattaaggagaacatgcacatgaagctgtacatggagggcaccgtggacaaccatcacttcaagtgcacatccgagggcgaaggcaagccctacgagggcacccagaccatgagaatcaaggtggtcgagggcggccctctccccttcgccttcgacatcctggctactagcttcctctacggcagcaagaccttcatcaaccacacccagggcatccccgacttcttcaagcagtccttccctgagggcttcacatgggagagagtcaccacatacgaagacgggggcgtgctgaccgctacccaggacaccagcctccaggacggctgcctcatctacaacgtcaagatcagaggggtgaacttcacatccaacggccctgtgatgcagaagaaaacactcggctgggaggccttcaccgagacgctgtaccccgctgacggcggcctggaaggcagaaacgacatggccctgaagctcgtgggcgggagccatctgatcgcaaacatcaagaccacatatagatccaagaaacccgctaagaacctcaagatgcctggcgtctactatgtggactacagactggaaagaatcaaggaggccaacaacgagacctacgtcgagcagcacgaggtggcagtggccagatactgcgacctccctagcaaactggggcacaagcttaattaacaccggtggcgcgttaagtcgacaatcaacctctggattacaaaatttgtgaaagattgactggtattcttaactatgttgctccttttacgctatgtggatacgctgctttaatgcctttgtatcatgctattgcttcccgtatggctttcattttctcctccttgtataaatcctggttgctgtctctttatgaggagttgtggcccgttgtcaggcaacgtggcgtggtgtgcactgtgtttgctgacgcaacccccactggttggggcattgccaccacctgtcagctcctttccgggactttcgctttccccctccctattgccacggcggaactcatcgccgcctgccttgcccgctgctggacaggggctcggctgttgggcactgacaattccgtggtgttgtcggggaaatcatcgtcctttccttggctgctcgcctgtgttgccacctggattctgcgcgggacgtccttctgctacgtcccttcggccctcaatccagcggaccttccttcccgcggcctgctgccggctctgcggcctcttccgcgtcttcgccttcgccctcagacgagtcggatctccctttgggccgcctccccgcgtcgactttaagaccaatgacttacaaggcagctgtagatcttagccactttttaaaagaaaaggggggactggaagggctaattcactcccaacgaagacaagatctgctttttgcttgtactgggtctctctggttagaccagatctgagcctgggagctctctggctaactagggaacccactgcttaagcctcaataaagcttgccttgagtgcttcaagtagtgtgtgcccgtctgttgtgtgactctggtaactagagatccctcagacccttttagtcagtgtggaaaatctctagcagtacgtatagtagttcatgtcatcttattattcagtatttataacttgcaaagaaatgaatatcagagagtgagaggaacttgtttattgcagcttataatggttacaaataaagcaatagcatcacaaatttcacaaataaagcatttttttcactgcattctagttgtggtttgtccaaactcatcaatgtatcttatcatgtctggctctagctatcccgcccctaactccgcccatcccgcccctaactccgcccagttccgcccattctccgccccatggctgactaattttttttatttatgcagaggccgaggccgcctcggcctctgagctattccagaagtagtgaggaggcttttttggaggcctagggacgtacccaattcgccctatagtgagtcgtattacgcgcgctcactggccgtcgttttacaacgtcgtgactgggaaaaccctggcgttacccaacttaatcgccttgcagcacatccccctttcgccagctggcgtaatagcgaagaggcccgcaccgatcgcccttcccaacagttgcgcagcctgaatggcgaatgggacgcgccctgtagcggcgcattaagcgcggcgggtgtggtggttacgcgcagcgtgaccgctacacttgccagcgccctagcgcccgctcctttcgctttcttcccttcctttctcgccacgttcgccggctttccccgtcaagctctaaatcgggggctccctttagggttccgatttagtgctttacggcacctcgaccccaaaaaacttgattagggtgatggttcacgtagtgggccatcgccctgatagacggtttttcgccctttgacgttggagtccacgttctttaatagtggactcttgttccaaactggaacaacactcaaccctatctcggtctattcttttgatttataagggattttgccgatttcggcctattggttaaaaaatgagctgatttaacaaaaatttaacgcgaattttaacaaaatattaacgcttacaatttaggtggcacttttcggggaaatgtgcgcggaacccctatttgtttatttttctaaatacattcaaatatgtatccgctcatgagacaataaccctgataaatgcttcaataatattgaaaaaggaagagtatgagtattcaacatttccgtgtcgcccttattcccttttttgcggcattttgccttcctgtttttgctcacccagaaacgctggtgaaagtaaaagatgctgaagatcagttgggtgcacgagtgggttacatcgaactggatctcaacagcggtaagatccttgagagttttcgccccgaagaacgttttccaatgatgagcacttttaaagttctgctatgtggcgcggtattatcccgtattgacgccgggcaagagcaactcggtcgccgcatacactattctcagaatgacttggttgagtactcaccagtcacagaaaagcatcttacggatggcatgacagtaagagaattatgcagtgctgccataaccatgagtgataacactgcggccaacttacttctgacaacgatcggaggaccgaaggagctaaccgcttttttgcacaacatgggggatcatgtaactcgccttgatcgttgggaaccggagctgaatgaagccataccaaacgacgagcgtgacaccacgatgcctgtagcaatggcaacaacgttgcgcaaactattaactggcgaactacttactctagcttcccggcaacaattaatagactggatggaggcggataaagttgcaggaccacttctgcgctcggcccttccggctggctggtttattgctgataaatctggagccggtgagcgtgggtctcgcggtatcattgcagcactggggccagatggtaagccctcccgtatcgtagttatctacacgacggggagtcaggcaactatggatgaacgaaatagacagatcgctgagataggtgcctcactgattaagcattggtaactgtcagaccaagtttactcatatatactttagattgatttaaaacttcatttttaatttaaaaggatctaggtgaagatcctttttgataatctcatgaccaaaatcccttaacgtgagttttcgttccactgagcgtcagaccccgtagaaaagatcaaaggatcttcttgagatcctttttttctgcgcgtaatctgctgcttgcaaacaaaaaaaccaccgctaccagcggtggtttgtttgccggatcaagagctaccaactctttttccgaaggtaactggcttcagcagagcgcagataccaaatactgttcttctagtgtagccgtagttaggccaccacttcaagaactctgtagcaccgcctacatacctcgctctgctaatcctgttaccagtggctgctgccagtggcgataagtcgtgtcttaccgggttggactcaagacgatagttaccggataaggcgcagcggtcgggctgaacggggggttcgtgcacacagcccagcttggagcgaacgacctacaccgaactgagatacctacagcgtgagctatgagaaagcgccacgcttcccgaagggagaaaggcggacaggtatccggtaagcggcagggtcggaacaggagagcgcacgagggagcttccagggggaaacgcctggtatctttatagtcctgtcgggtttcgccacctctgacttgagcgtcgatttttgtgatgctcgtcaggggggcggagcctatggaaaaacgccagcaacgcggcctttttacggttcctggccttttgctggccttttgctcacatgttctttcctgcgttatcccctgattctgtggataaccgtattaccgcctttgagtgagctgataccgctcgccgcagccgaacgaccgagcgcagcgagtcagtgagcgaggaagcggaagagcgcccaatacgcaaaccgcctctccccgcgcgttggccgattcattaatgcagctggcacgacaggtttcccgactggaaagcgggcagtgagcgcaacgcaattaatgtgagttagctcactcattaggcaccccaggctttacactttatgcttccggctcgtatgttgtgtggaattgtgagcggataacaatttcacacaggaaacagctatgaccatgattacgccaagcgcgcaattaaccctcactaaagggaacaaaagctggagctgcaagcttaatgtagtcttatgcaatactcttgtagtcttgcaacatggtaacgatgagttagcaacatgccttacaaggagagaaaaagcaccgtgcatgccgattggtggaagtaaggtggtacgatcgtgccttattaggaaggcaacagacgggtctgacatggattggacgaaccactgaattgccgcattgcagagatattgtatttaagtgcctagctcgatacataaacgggtctctctggttagaccagatctgagcctgggagctctctggctaactagggaacccactgcttaagcctcaataaagcttgccttgagtgcttcaagtagtgtgtgcccgtctgttgtgtgactctggtaactagagatccctcagacccttttagtcagtgtggaaaatctctagcagtggcgcccgaacagggacttgaaagcgaaagggaaaccagaggagctctctcgacgcaggactcggcttgctgaagcgcgcacggcaagaggcgaggggcggcgactggtgagtacgccaaaaattttgactagcggaggctagaaggagagagatgggtgcgagagcgtcagtattaagcgggggagaattagatcgcgatgggaaaaaattcggttaaggccagggggaaagaaaaaatataaattaaaacatatagtatgggcaagcagggagctagaacgattcgcagttaatcctggcctgttagaaacatcagaaggctgtagacaaatactgggacagctacaaccatcccttcagacaggatcagaagaacttagatcattatataatacagtagcaaccctctattgtgtgcatcaaaggatagagataaaagacaccaaggaagctttagacaagatagaggaagagcaaaacaaaagtaagaccaccgcacagcaagcggccgctgatcttcagacctggaggaggagatatgagggacaattggagaagtgaattatataaatataaagtagtaaaaattgaaccattaggagtagcacccaccaaggcaaagagaagagtggtgcagagagaaaaaagagcagtgggaataggagctttgttccttgggttcttgggagcagcaggaagcactatgggcgcagcgtcaatgacgctgacggtacaggccagacaattattgtctggtatagtgcagcagcagaacaatttgctgagggctattgaggcgcaacagcatctgttgcaactcacagtctggggcatcaagcagctccaggcaagaatcctggctgtggaaagatacctaaaggatcaacagctcctggggatttggggttgctctggaaaactcatttgcaccactgctgtgccttggaatgctagttggagtaataaatctctggaacagatttggaatcacacgacctggatggagtgggacagagaaattaacaattacacaagcttaatacactccttaattgaagaatcgcaaaaccagcaagaaaagaatgaacaagaattattggaattagataaatgggcaagtttgtggaattggtttaacataacaaattggctgtggtatataaaattattcataatgatagtaggaggcttggtaggtttaagaatagtttttgctgtactttctatagtgaatagagttaggcagggatattcaccattatcgtttcagacccacctcccaaccccgaggggacccttgcgccttttccaaggcagccctgggtttgcgcagggacgcggctgctctgggcgtggttccgggaaacgcagcggcgccgaccctgggtctcgcacattcttcacgtccgttcgcagcgtcacccggatcttcgccgctacccttgtgggccccccggcgacgcttcctgctccgcccctaagtcgggaaggttccttgcggttcgcggcgtgccggacgtgacaaacggaagccgcacgtctcactagtaccctcgcagacggacagcgccagggagcaatggcagcgcgccgaccgcgatgggctgtggccaatagcggctgctcagcagggcgcgccgagagcagcggccgggaaggggcggtgcgggaggcggggtgtggggcggtagtgtgggccctgttcctgcccgcgcggtgttccgcattctgcaagcctccggagcgcacgtcggcagtcggctccctcgttgaccgaatcaccgacctctctccccagggggtacccagctgtctagagaattctagatcttgagacaaatggcagtattcatccacaattttaaaagaaaaggggggattggggggtacagtgcaggggaaagaatagtagacataatagcaacagacatacaaactaaagaattacaaaaacaaattacaaaaattcaaaattttcgggtttattacagggacagcagagatccactttggcgccggctcgaggggg

SEQ ID NO: 49 - protein, 206 aa, Artificial Sequence
  Synthetic Polypeptide
MTEYKPTVRLATRDDVPRAVRTLAAAFADYPATRHTVDPDRHIERVTELQELFLTRVGLDIGKVWVADDGAAVAVWTTPESVEAGAVFAEIGPRMAELSGCISGDSLISLASTGKRVSIKDLLDEKDFEIWAINEQTMKLESAKVSRVFCTGKKLVYILKTRLGRTIKATANHRFLTIDGWKRLDELSLKEHIALPRKLESSSLQL

SEQ ID NO: 50 - DNA, 9096 bp, Artificial Sequence
  Synthetic Polynucleotide
cccggggttattaatagtaatcaattacggggtcattagttcatagcccatatatggagttccgcgttacataacttacggtaaatggcccgcctggctgaccgcccaacgacccccgcccattgacgtcaataatgacgtatgttcccatagtaacgccaatagggactttccattgacgtcaatgggtggagtatttacggtaaactgcccacttggcagtacatcaagtgtatcatatgccaagtacgccccctattgacgtcaatgacggtaaatggcccgcctggcattatgcccagtacatgaccttatgggactttcctacttggcagtacatctacgtattagtcatcgctattaccatggtgatgcggttttggcagtacatcaatgggcgtggatagcggtttgactcacggggatttccaagtctccaccccattgacgtcaatgggagtttgttttggcaccaaaatcaacgggactttccaaaatgtcgtaacaactccgccccattgacgcaaatgggcggtaggcgtgtacggtgggaggtctatataagcagagctctctggctaactgtcgggatcaacaagtttgtacaaaaaagcaggctccgaattcaccggtgccgccaccatgagtcccgaaatcgaaaagctctctcagagcgatatatattgggactccatcgtaagcataacagagacgggggtcgaggaggtgttcgatctgacagttcctgggcctcataatttcgtagcgaacgacatcattgtacataactcccggctggccgcgcagcaacagatggaaggcctcctggcgccgcaccggcccaaggagcccgcgtggttcctggccaccgtcggcgtctcgcccgaccaccagggcaagggtctgggcagcgccgtcgtgctccccggagtggaggcggccgagcgcgccggggtgcccgccttcctggagacctccgcgccccgcaacctccccttctacgagcggctcggcttcaccgtcaccgccgacgtcgaggtgcccgaaggaccgcgcacctggtgcatgacccgcaagcccggtgcctgattaattaagaattcgacccagctttcttgtacaaagtggttggtaagcctatccctaaccctctcctcggtctcgattctacgtagtaatgagctagcagtctcgaggttaacgaattccgccccccccctaacgttactggccgaagccgcttggaataaggccggtgtgcgcttgtctatatgttattttccaccatattgccgtcttttggcaatgtgagggcccggaaacctggccctgtcttcttgacgagcattcctaggggtctttcccctctcgccaaaggaatgcaaggtctgttgaatgtcgtgaaggaagcagttcctctggaagcttcttgaagacaaacaacgtctgtagcgaccctttgcaggcagcggaaccccccacctggcgacaggtgcccctgcggccaaaagccacgtgtataagatacacctgcaaaggcggcacaaccccagtgccacgttgtgagttggatagttgtggaaagagtcaaatggctctcctcaagcgtattcaacaaggggctgaaggatgcccagaaggtaccccattgtatgggatctgatctggggcctcggtgcacatgctttacatgtgtttagtcgaggttaaaaaaacgtctaggccccccgaaccacggggacgtggttttcctttgaaaaacacgataataccatggtgagcaagggcgaggaggataacatggccatcatcaaggagttcatgcgcttcaaggtgcacatggagggctccgtgaacggccacgagttcgagatcgagggcgagggcgagggccgcccctacgagggcacccagaccgccaagctgaaggtgaccaagggtggccccctgcccttcgcctgggacatcctgtcccctcagttcatgtacggctccaaggcctacgtgaagcaccccgccgacatccccgactacttgaagctgtccttccccgagggcttcaagtgggagcgcgtgatgaacttcgaggacggcggcgtggtgaccgtgacccaggactcctccctgcaggacggcgagttcatctacaaggtgaagctgcgcggcaccaacttcccctccgacggccccgtaatgcagaagaagaccatgggctgggaggcctcctccgagcggatgtaccccgaggacggcgccctgaagggcgagatcaagcagaggctgaagctgaaggacggcggccactacgacgctgaggtcaagaccacctacaaggccaagaagcccgtgcagctgcccggcgcctacaacgtcaacatcaagttggacatcacctcccacaacgaggactacaccatcgtggaacagtacgaacgcgccgagggccgccactccaccggcggcatggacgagctgtacaagtaacaccggtggcgcgttaagtcgacaatcaacctctggattacaaaatttgtgaaagattgactggtattcttaactatgttgctccttttacgctatgtggatacgctgctttaatgcctttgtatcatgctattgcttcccgtatggctttcattttctcctccttgtataaatcctggttgctgtctctttatgaggagttgtggcccgttgtcaggcaacgtggcgtggtgtgcactgtgtttgctgacgcaacccccactggttggggcattgccaccacctgtcagctcctttccgggactttcgctttccccctccctattgccacggcggaactcatcgccgcctgccttgcccgctgctggacaggggctcggctgttgggcactgacaattccgtggtgttgtcggggaaatcatcgtcctttccttggctgctcgcctgtgttgccacctggattctgcgcgggacgtccttctgctacgtcccttcggccctcaatccagcggaccttccttcccgcggcctgctgccggctctgcggcctcttccgcgtcttcgccttcgccctcagacgagtcggatctccctttgggccgcctccccgcgtcgactttaagaccaatgacttacaaggcagctgtagatcttagccactttttaaaagaaaaggggggactggaagggctaattcactcccaacgaagacaagatctgctttttgcttgtactgggtctctctggttagaccagatctgagcctgggagctctctggctaactagggaacccactgcttaagcctcaataaagcttgccttgagtgcttcaagtagtgtgtgcccgtctgttgtgtgactctggtaactagagatccctcagacccttttagtcagtgtggaaaatctctagcagtacgtatagtagttcatgtcatcttattattcagtatttataacttgcaaagaaatgaatatcagagagtgagaggaacttgtttattgcagcttataatggttacaaataaagcaatagcatcacaaatttcacaaataaagcatttttttcactgcattctagttgtggtttgtccaaactcatcaatgtatcttatcatgtctggctctagctatcccgcccctaactccgcccatcccgcccctaactccgcccagttccgcccattctccgccccatggctgactaattttttttatttatgcagaggccgaggccgcctcggcctctgagctattccagaagtagtgaggaggcttttttggaggcctagggacgtacccaattcgccctatagtgagtcgtattacgcgcgctcactggccgtcgttttacaacgtcgtgactgggaaaaccctggcgttacccaacttaatcgccttgcagcacatccccctttcgccagctggcgtaatagcgaagaggcccgcaccgatcgcccttcccaacagttgcgcagcctgaatggcgaatgggacgcgccctgtagcggcgcattaagcgcggcgggtgtggtggttacgcgcagcgtgaccgctacacttgccagcgccctagcgcccgctcctttcgctttcttcccttcctttctcgccacgttcgccggctttccccgtcaagctctaaatcgggggctccctttagggttccgatttagtgctttacggcacctcgaccccaaaaaacttgattagggtgatggttcacgtagtgggccatcgccctgatagacggtttttcgccctttgacgttggagtccacgttctttaatagtggactcttgttccaaactggaacaacactcaaccctatctcggtctattcttttgatttataagggattttgccgatttcggcctattggttaaaaaatgagctgatttaacaaaaatttaacgcgaattttaacaaaatattaacgcttacaatttaggtggcacttttcggggaaatgtgcgcggaacccctatttgtttatttttctaaatacattcaaatatgtatccgctcatgagacaataaccctgataaatgcttcaataatattgaaaaaggaagagtatgagtattcaacatttccgtgtcgcccttattcccttttttgcggcattttgccttcctgtttttgctcacccagaaacgctggtgaaagtaaaagatgctgaagatcagttgggtgcacgagtgggttacatcgaactggatctcaacagcggtaagatccttgagagttttcgccccgaagaacgttttccaatgatgagcacttttaaagttctgctatgtggcgcggtattatcccgtattgacgccgggcaagagcaactcggtcgccgcatacactattctcagaatgacttggttgagtactcaccagtcacagaaaagcatcttacggatggcatgacagtaagagaattatgcagtgctgccataaccatgagtgataacactgcggccaacttacttctgacaacgatcggaggaccgaaggagctaaccgcttttttgcacaacatgggggatcatgtaactcgccttgatcgttgggaaccggagctgaatgaagccataccaaacgacgagcgtgacaccacgatgcctgtagcaatggcaacaacgttgcgcaaactattaactggcgaactacttactctagcttcccggcaacaattaatagactggatggaggcggataaagttgcaggaccacttctgcgctcggcccttccggctggctggtttattgctgataaatctggagccggtgagcgtgggtctcgcggtatcattgcagcactggggccagatggtaagccctcccgtatcgtagttatctacacgacggggagtcaggcaactatggatgaacgaaatagacagatcgctgagataggtgcctcactgattaagcattggtaactgtcagaccaagtttactcatatatactttagattgatttaaaacttcatttttaatttaaaaggatctaggtgaagatcctttttgataatctcatgaccaaaatcccttaacgtgagttttcgttccactgagcgtcagaccccgtagaaaagatcaaaggatcttcttgagatcctttttttctgcgcgtaatctgctgcttgcaaacaaaaaaaccaccgctaccagcggtggtttgtttgccggatcaagagctaccaactctttttccgaaggtaactggcttcagcagagcgcagataccaaatactgttcttctagtgtagccgtagttaggccaccacttcaagaactctgtagcaccgcctacatacctcgctctgctaatcctgttaccagtggctgctgccagtggcgataagtcgtgtcttaccgggttggactcaagacgatagttaccggataaggcgcagcggtcgggctgaacggggggttcgtgcacacagcccagcttggagcgaacgacctacaccgaactgagatacctacagcgtgagctatgagaaagcgccacgcttcccgaagggagaaaggcggacaggtatccggtaagcggcagggtcggaacaggagagcgcacgagggagcttccagggggaaacgcctggtatctttatagtcctgtcgggtttcgccacctctgacttgagcgtcgatttttgtgatgctcgtcaggggggcggagcctatggaaaaacgccagcaacgcggcctttttacggttcctggccttttgctggccttttgctcacatgttctttcctgcgttatcccctgattctgtggataaccgtattaccgcctttgagtgagctgataccgctcgccgcagccgaacgaccgagcgcagcgagtcagtgagcgaggaagcggaagagcgcccaatacgcaaaccgcctctccccgcgcgttggccgattcattaatgcagctggcacgacaggtttcccgactggaaagcgggcagtgagcgcaacgcaattaatgtgagttagctcactcattaggcaccccaggctttacactttatgcttccggctcgtatgttgtgtggaattgtgagcggataacaatttcacacaggaaacagctatgaccatgattacgccaagcgcgcaattaaccctcactaaagggaacaaaagctggagctgcaagcttaatgtagtcttatgcaatactcttgtagtcttgcaacatggtaacgatgagttagcaacatgccttacaaggagagaaaaagcaccgtgcatgccgattggtggaagtaaggtggtacgatcgtgccttattaggaaggcaacagacgggtctgacatggattggacgaaccactgaattgccgcattgcagagatattgtatttaagtgcctagctcgatacataaacgggtctctctggttagaccagatctgagcctgggagctctctggctaactagggaacccactgcttaagcctcaataaagcttgccttgagtgcttcaagtagtgtgtgcccgtctgttgtgtgactctggtaactagagatccctcagacccttttagtcagtgtggaaaatctctagcagtggcgcccgaacagggacttgaaagcgaaagggaaaccagaggagctctctcgacgcaggactcggcttgctgaagcgcgcacggcaagaggcgaggggcggcgactggtgagtacgccaaaaattttgactagcggaggctagaaggagagagatgggtgcgagagcgtcagtattaagcgggggagaattagatcgcgatgggaaaaaattcggttaaggccagggggaaagaaaaaatataaattaaaacatatagtatgggcaagcagggagctagaacgattcgcagttaatcctggcctgttagaaacatcagaaggctgtagacaaatactgggacagctacaaccatcccttcagacaggatcagaagaacttagatcattatataatacagtagcaaccctctattgtgtgcatcaaaggatagagataaaagacaccaaggaagctttagacaagatagaggaagagcaaaacaaaagtaagaccaccgcacagcaagcggccgctgatcttcagacctggaggaggagatatgagggacaattggagaagtgaattatataaatataaagtagtaaaaattgaaccattaggagtagcacccaccaaggcaaagagaagagtggtgcagagagaaaaaagagcagtgggaataggagctttgttccttgggttcttgggagcagcaggaagcactatgggcgcagcgtcaatgacgctgacggtacaggccagacaattattgtctggtatagtgcagcagcagaacaatttgctgagggctattgaggcgcaacagcatctgttgcaactcacagtctggggcatcaagcagctccaggcaagaatcctggctgtggaaagatacctaaaggatcaacagctcctggggatttggggttgctctggaaaactcatttgcaccactgctgtgccttggaatgctagttggagtaataaatctctggaacagatttggaatcacacgacctggatggagtgggacagagaaattaacaattacacaagcttaatacactccttaattgaagaatcgcaaaaccagcaagaaaagaatgaacaagaattattggaattagataaatgggcaagtttgtggaattggtttaacataacaaattggctgtggtatataaaattattcataatgatagtaggaggcttggtaggtttaagaatagtttttgctgtactttctatagtgaatagagttaggcagggatattcaccattatcgtttcagacccacctcccaaccccgaggggacccttgcgccttttccaaggcagccctgggtttgcgcagggacgcggctgctctgggcgtggttccgggaaacgcagcggcgccgaccctgggtctcgcacattcttcacgtccgttcgcagcgtcacccggatcttcgccgctacccttgtgggccccccggcgacgcttcctgctccgcccctaagtcgggaaggttccttgcggttcgcggcgtgccggacgtgacaaacggaagccgcacgtctcactagtaccctcgcagacggacagcgccagggagcaatggcagcgcgccgaccgcgatgggctgtggccaatagcggctgctcagcagggcgcgccgagagcagcggccgggaaggggcggtgcgggaggcggggtgtggggcggtagtgtgggccctgttcctgcccgcgcggtgttccgcattctgcaagcctccggagcgcacgtcggcagtcggctccctcgttgaccgaatcaccgacctctctccccagggggtacccagctgtctagagaattctagatcttgagacaaatggcagtattcatccacaattttaaaagaaaaggggggattggggggtacagtgcaggggaaagaatagtagacataatagcaacagacatacaaactaaagaattacaaaaacaaattacaaaaattcaaaattttcgggtttattacagggacagcagagatccactttggcgccggctcgaggggg

SEQ ID NO: 51 - protein, 148 aa, Artificial Sequence
  Synthetic Polypeptide
MSPEIEKLSQSDIYWDSIVSITETGVEEVFDLTVPGPHNFVANDIIVHNSRLAAQQQMEGLLAPHRPKEPAWFLATVGVSPDHQGKGLGSAVVLPGVEAAERAGVPAFLETSAPRNLPFYERLGFTVTADVEVPEGPRTWCMTRKPGA

SEQ ID NO: 52 - DNA, 9351 bp, Artificial Sequence
  Synthetic Polynucleotide
cccggggttattaatagtaatcaattacggggtcattagttcatagcccatatatggagttccgcgttacataacttacggtaaatggcccgcctggctgaccgcccaacgacccccgcccattgacgtcaataatgacgtatgttcccatagtaacgccaatagggactttccattgacgtcaatgggtggagtatttacggtaaactgcccacttggcagtacatcaagtgtatcatatgccaagtacgccccctattgacgtcaatgacggtaaatggcccgcctggcattatgcccagtacatgaccttatgggactttcctacttggcagtacatctacgtattagtcatcgctattaccatggtgatgcggttttggcagtacatcaatgggcgtggatagcggtttgactcacggggatttccaagtctccaccccattgacgtcaatgggagtttgttttggcaccaaaatcaacgggactttccaaaatgtcgtaacaactccgccccattgacgcaaatgggcggtaggcgtgtacggtgggaggtctatataagcagagctctctggctaactgtcgggatcaacaagtttgtacaaaaaagcaggctccgaattcaccggtgccaccatgggatcggccattgaacaagatggattgcacgcaggttctccggccgcttgggtggagaggctattcggctatgactgggcacaacagacaatcggctgctctgatgccgccgtgttccggctgtcagcgcaggggcgcccggttctttttgtcaagaccgacctgtccggtgccctgaatgaactgcaggacgaggcagcgcggctatcgtggctggccacgacgggcgttccttgcgcagctgtgctcgacgttgtcactgaagcgggaagggactggctgctattgggcgaagtgccggggcaggatctcctgtcatctcaccttgctcctgccgagaaagtatccatcatggctgatgcaatgcggcggctgcatacgcttgatccggctacctgcctttcatacgagaccgagatcctgactgtcgagtacggattgcttcctatcggcaaaatcgtggagaagaggattgaatgtaccgtctattcagtcgataataatgggaacatctacacacagcccgtggctcaatggcacgacagaggagagcaggaagtttttgaatactgtctcgaggacggatccctcatccgcgctactaaagatcataagtttatgaccgtggacggccagatgctgccaattgacgaaatttttgaacgagagctggatctgatgagagtcgacaaccttccaaactgattaattaagaattcgacccagctttcttgtacaaagtggttggtaagcctatccctaaccctctcctcggtctcgattctacgtagtaatgagctagcagtctcgaggttaacgaattccgccccccccctaacgttactggccgaagccgcttggaataaggccggtgtgcgcttgtctatatgttattttccaccatattgccgtcttttggcaatgtgagggcccggaaacctggccctgtcttcttgacgagcattcctaggggtctttcccctctcgccaaaggaatgcaaggtctgttgaatgtcgtgaaggaagcagttcctctggaagcttcttgaagacaaacaacgtctgtagcgaccctttgcaggcagcggaaccccccacctggcgacaggtgcccctgcggccaaaagccacgtgtataagatacacctgcaaaggcggcacaaccccagtgccacgttgtgagttggatagttgtggaaagagtcaaatggctctcctcaagcgtattcaacaaggggctgaaggatgcccagaaggtaccccattgtatgggatctgatctggggcctcggtgcacatgctttacatgtgtttagtcgaggttaaaaaaacgtctaggccccccgaaccacggggacgtggttttcctttgaaaaacacgataataccatggccatgagcgagctgattaaggagaacatgcacatgaagctgtacatggagggcaccgtggacaaccatcacttcaagtgcacatccgagggcgaaggcaagccctacgagggcacccagaccatgagaatcaaggtggtcgagggcggccctctccccttcgccttcgacatcctggctactagcttcctctacggcagcaagaccttcatcaaccacacccagggcatccccgacttcttcaagcagtccttccctgagggcttcacatgggagagagtcaccacatacgaagacgggggcgtgctgaccgctacccaggacaccagcctccaggacggctgcctcatctacaacgtcaagatcagaggggtgaacttcacatccaacggccctgtgatgcagaagaaaacactcggctgggaggccttcaccgagacgctgtaccccgctgacggcggcctggaaggcagaaacgacatggccctgaagctcgtgggcgggagccatctgatcgcaaacatcaagaccacatatagatccaagaaacccgctaagaacctcaagatgcctggcgtctactatgtggactacagactggaaagaatcaaggaggccaacaacgagacctacgtcgagcagcacgaggtggcagtggccagatactgcgacctccctagcaaactggggcacaagcttaattaacaccggtggcgcgttaagtcgacaatcaacctctggattacaaaatttgtgaaagattgactggtattcttaactatgttgctccttttacgctatgtggatacgctgctttaatgcctttgtatcatgctattgcttcccgtatggctttcattttctcctccttgtataaatcctggttgctgtctctttatgaggagttgtggcccgttgtcaggcaacgtggcgtggtgtgcactgtgtttgctgacgcaacccccactggttggggcattgccaccacctgtcagctcctttccgggactttcgctttccccctccctattgccacggcggaactcatcgccgcctgccttgcccgctgctggacaggggctcggctgttgggcactgacaattccgtggtgttgtcggggaaatcatcgtcctttccttggctgctcgcctgtgttgccacctggattctgcgcgggacgtccttctgctacgtcccttcggccctcaatccagcggaccttccttcccgcggcctgctgccggctctgcggcctcttccgcgtcttcgccttcgccctcagacgagtcggatctccctttgggccgcctccccgcgtcgactttaagaccaatgacttacaaggcagctgtagatcttagccactttttaaaagaaaaggggggactggaagggctaattcactcccaacgaagacaagatctgctttttgcttgtactgggtctctctggttagaccagatctgagcctgggagctctctggctaactagggaacccactgcttaagcctcaataaagcttgccttgagtgcttcaagtagtgtgtgcccgtctgttgtgtgactctggtaactagagatccctcagacccttttagtcagtgtggaaaatctctagcagtacgtatagtagttcatgtcatcttattattcagtatttataacttgcaaagaaatgaatatcagagagtgagaggaacttgtttattgcagcttataatggttacaaataaagcaatagcatcacaaatttcacaaataaagcatttttttcactgcattctagttgtggtttgtccaaactcatcaatgtatcttatcatgtctggctctagctatcccgcccctaactccgcccatcccgcccctaactccgcccagttccgcccattctccgccccatggctgactaattttttttatttatgcagaggccgaggccgcctcggcctctgagctattccagaagtagtgaggaggcttttttggaggcctagggacgtacccaattcgccctatagtgagtcgtattacgcgcgctcactggccgtcgttttacaacgtcgtgactgggaaaaccctggcgttacccaacttaatcgccttgcagcacatccccctttcgccagctggcgtaatagcgaagaggcccgcaccgatcgcccttcccaacagttgcgcagcctgaatggcgaatgggacgcgccctgtagcggcgcattaagcgcggcgggtgtggtggttacgcgcagcgtgaccgctacacttgccagcgccctagcgcccgctcctttcgctttcttcccttcctttctcgccacgttcgccggctttccccgtcaagctctaaatcgggggctccctttagggttccgatttagtgctttacggcacctcgaccccaaaaaacttgattagggtgatggttcacgtagtgggccatcgccctgatagacggtttttcgccctttgacgttggagtccacgttctttaatagtggactcttgttccaaactggaacaacactcaaccctatctcggtctattcttttgatttataagggattttgccgatttcggcctattggttaaaaaatgagctgatttaacaaaaatttaacgcgaattttaacaaaatattaacgcttacaatttaggtggcacttttcggggaaatgtgcgcggaacccctatttgtttatttttctaaatacattcaaatatgtatccgctcatgagacaataaccctgataaatgcttcaataatattgaaaaaggaagagtatgagtattcaacatttccgtgtcgcccttattcccttttttgcggcattttgccttcctgtttttgctcacccagaaacgctggtgaaagtaaaagatgctgaagatcagttgggtgcacgagtgggttacatcgaactggatctcaacagcggtaagatccttgagagttttcgccccgaagaacgttttccaatgatgagcacttttaaagttctgctatgtggcgcggtattatcccgtattgacgccgggcaagagcaactcggtcgccgcatacactattctcagaatgacttggttgagtactcaccagtcacagaaaagcatcttacggatggcatgacagtaagagaattatgcagtgctgccataaccatgagtgataacactgcggccaacttacttctgacaacgatcggaggaccgaaggagctaaccgcttttttgcacaacatgggggatcatgtaactcgccttgatcgttgggaaccggagctgaatgaagccataccaaacgacgagcgtgacaccacgatgcctgtagcaatggcaacaacgttgcgcaaactattaactggcgaactacttactctagcttcccggcaacaattaatagactggatggaggcggataaagttgcaggaccacttctgcgctcggcccttccggctggctggtttattgctgataaatctggagccggtgagcgtgggtctcgcggtatcattgcagcactggggccagatggtaagccctcccgtatcgtagttatctacacgacggggagtcaggcaactatggatgaacgaaatagacagatcgctgagataggtgcctcactgattaagcattggtaactgtcagaccaagtttactcatatatactttagattgatttaaaacttcatttttaatttaaaaggatctaggtgaagatcctttttgataatctcatgaccaaaatcccttaacgtgagttttcgttccactgagcgtcagaccccgtagaaaagatcaaaggatcttcttgagatcctttttttctgcgcgtaatctgctgcttgcaaacaaaaaaaccaccgctaccagcggtggtttgtttgccggatcaagagctaccaactctttttccgaaggtaactggcttcagcagagcgcagataccaaatactgttcttctagtgtagccgtagttaggccaccacttcaagaactctgtagcaccgcctacatacctcgctctgctaatcctgttaccagtggctgctgccagtggcgataagtcgtgtcttaccgggttggactcaagacgatagttaccggataaggcgcagcggtcgggctgaacggggggttcgtgcacacagcccagcttggagcgaacgacctacaccgaactgagatacctacagcgtgagctatgagaaagcgccacgcttcccgaagggagaaaggcggacaggtatccggtaagcggcagggtcggaacaggagagcgcacgagggagcttccagggggaaacgcctggtatctttatagtcctgtcgggtttcgccacctctgacttgagcgtcgatttttgtgatgctcgtcaggggggcggagcctatggaaaaacgccagcaacgcggcctttttacggttcctggccttttgctggccttttgctcacatgttctttcctgcgttatcccctgattctgtggataaccgtattaccgcctttgagtgagctgataccgctcgccgcagccgaacgaccgagcgcagcgagtcagtgagcgaggaagcggaagagcgcccaatacgcaaaccgcctctccccgcgcgttggccgattcattaatgcagctggcacgacaggtttcccgactggaaagcgggcagtgagcgcaacgcaattaatgtgagttagctcactcattaggcaccccaggctttacactttatgcttccggctcgtatgttgtgtggaattgtgagcggataacaatttcacacaggaaacagctatgaccatgattacgccaagcgcgcaattaaccctcactaaagggaacaaaagctggagctgcaagcttaatgtagtcttatgcaatactcttgtagtcttgcaacatggtaacgatgagttagcaacatgccttacaaggagagaaaaagcaccgtgcatgccgattggtggaagtaaggtggtacgatcgtgccttattaggaaggcaacagacgggtctgacatggattggacgaaccactgaattgccgcattgcagagatattgtatttaagtgcctagctcgatacataaacgggtctctctggttagaccagatctgagcctgggagctctctggctaactagggaacccactgcttaagcctcaataaagcttgccttgagtgcttcaagtagtgtgtgcccgtctgttgtgtgactctggtaactagagatccctcagacccttttagtcagtgtggaaaatctctagcagtggcgcccgaacagggacttgaaagcgaaagggaaaccagaggagctctctcgacgcaggactcggcttgctgaagcgcgcacggcaagaggcgaggggcggcgactggtgagtacgccaaaaattttgactagcggaggctagaaggagagagatgggtgcgagagcgtcagtattaagcgggggagaattagatcgcgatgggaaaaaattcggttaaggccagggggaaagaaaaaatataaattaaaacatatagtatgggcaagcagggagctagaacgattcgcagttaatcctggcctgttagaaacatcagaaggctgtagacaaatactgggacagctacaaccatcccttcagacaggatcagaagaacttagatcattatataatacagtagcaaccctctattgtgtgcatcaaaggatagagataaaagacaccaaggaagctttagacaagatagaggaagagcaaaacaaaagtaagaccaccgcacagcaagcggccgctgatcttcagacctggaggaggagatatgagggacaattggagaagtgaattatataaatataaagtagtaaaaattgaaccattaggagtagcacccaccaaggcaaagagaagagtggtgcagagagaaaaaagagcagtgggaataggagctttgttccttgggttcttgggagcagcaggaagcactatgggcgcagcgtcaatgacgctgacggtacaggccagacaattattgtctggtatagtgcagcagcagaacaatttgctgagggctattgaggcgcaacagcatctgttgcaactcacagtctggggcatcaagcagctccaggcaagaatcctggctgtggaaagatacctaaaggatcaacagctcctggggatttggggttgctctggaaaactcatttgcaccactgctgtgccttggaatgctagttggagtaataaatctctggaacagatttggaatcacacgacctggatggagtgggacagagaaattaacaattacacaagcttaatacactccttaattgaagaatcgcaaaaccagcaagaaaagaatgaacaagaattattggaattagataaatgggcaagtttgtggaattggtttaacataacaaattggctgtggtatataaaattattcataatgatagtaggaggcttggtaggtttaagaatagtttttgctgtactttctatagtgaatagagttaggcagggatattcaccattatcgtttcagacccacctcccaaccccgaggggacccttgcgccttttccaaggcagccctgggtttgcgcagggacgcggctgctctgggcgtggttccgggaaacgcagcggcgccgaccctgggtctcgcacattcttcacgtccgttcgcagcgtcacccggatcttcgccgctacccttgtgggccccccggcgacgcttcctgctccgcccctaagtcgggaaggttccttgcggttcgcggcgtgccggacgtgacaaacggaagccgcacgtctcactagtaccctcgcagacggacagcgccagggagcaatggcagcgcgccgaccgcgatgggctgtggccaatagcggctgctcagcagggcgcgccgagagcagcggccgggaaggggcggtgcgggaggcggggtgtggggcggtagtgtgggccctgttcctgcccgcgcggtgttccgcattctgcaagcctccggagcgcacgtcggcagtcggctccctcgttgaccgaatcaccgacctctctccccagggggtacccagctgtctagagaattctagatcttgagacaaatggcagtattcatccacaattttaaaagaaaaggggggattggggggtacagtgcaggggaaagaatagtagacataatagcaacagacatacaaactaaagaattacaaaaacaaattacaaaaattcaaaattttcgggtttattacagggacagcagagatccactttggcgccggctcgaggggg

SEQ ID NO: 53 - protein, 235 aa, Artificial Sequence
  Synthetic Polypeptide
MGSAIEQDGLHAGSPAAWVERLFGYDWAQQTIGCSDAAVFRLSAQGRPVLFVKTDLSGALNELQDEAARLSWLATTGVPCAAVLDVVTEAGRDWLLLGEVPGQDLLSSHLAPAEKVSIMADAMRRLHTLDPATCLSYETEILTVEYGLLPIGKIVEKRIECTVYSVDNNGNIYTQPVAQWHDRGEQEVFEYCLEDGSLIRATKDHKFMTVDGQMLPIDEIFERELDLMRVDNLPN

SEQ ID NO: 54 - DNA, 9162 bp, Artificial Sequence
  Synthetic Polynucleotide
cccggggttattaatagtaatcaattacggggtcattagttcatagcccatatatggagttccgcgttacataacttacggtaaatggcccgcctggctgaccgcccaacgacccccgcccattgacgtcaataatgacgtatgttcccatagtaacgccaatagggactttccattgacgtcaatgggtggagtatttacggtaaactgcccacttggcagtacatcaagtgtatcatatgccaagtacgccccctattgacgtcaatgacggtaaatggcccgcctggcattatgcccagtacatgaccttatgggactttcctacttggcagtacatctacgtattagtcatcgctattaccatggtgatgcggttttggcagtacatcaatgggcgtggatagcggtttgactcacggggatttccaagtctccaccccattgacgtcaatgggagtttgttttggcaccaaaatcaacgggactttccaaaatgtcgtaacaactccgccccattgacgcaaatgggcggtaggcgtgtacggtgggaggtctatataagcagagctctctggctaactgtcgggatcaacaagtttgtacaaaaaagcaggctccgaattcaccggtgccgccaccatgattaagatcgctacgcggaagtacctggggaaacagaacgtctacgacataggtgtggagcgcgatcacaactttgctctgaaaaatggatttatcgccagcaactgcccattcgaccaccaagcgaaacatcgcatcgagcgagcacgtactcggatggaagccggtcttgtcgatcaggatgatctggacgaagagcatcaggggctcgcgccagccgaactgttcgccaggctcaaggcgcgcatgcccgacggcgatgatctcgtcgtgacccatggcgatgcctgcttgccgaatatcatggtggaaaatggccgcttttctggattcatcgactgtggccggctgggtgtggcggaccgctatcaggacatagcgttggctacccgtgatattgctgaagagcttggcggcgaatgggctgaccgcttcctcgtgctttacggtatcgccgctcccgattcgcagcgcatcgccttctatcgccttcttgacgagttcttctgattaattaagaattcgacccagctttcttgtacaaagtggttggtaagcctatccctaaccctctcctcggtctcgattctacgtagtaatgagctagcagtctcgaggttaacgaattccgccccccccctaacgttactggccgaagccgcttggaataaggccggtgtgcgcttgtctatatgttattttccaccatattgccgtcttttggcaatgtgagggcccggaaacctggccctgtcttcttgacgagcattcctaggggtctttcccctctcgccaaaggaatgcaaggtctgttgaatgtcgtgaaggaagcagttcctctggaagcttcttgaagacaaacaacgtctgtagcgaccctttgcaggcagcggaaccccccacctggcgacaggtgcccctgcggccaaaagccacgtgtataagatacacctgcaaaggcggcacaaccccagtgccacgttgtgagttggatagttgtggaaagagtcaaatggctctcctcaagcgtattcaacaaggggctgaaggatgcccagaaggtaccccattgtatgggatctgatctggggcctcggtgcacatgctttacatgtgtttagtcgaggttaaaaaaacgtctaggccccccgaaccacggggacgtggttttcctttgaaaaacacgataataccatggtgagcaagggcgaggaggataacatggccatcatcaaggagttcatgcgcttcaaggtgcacatggagggctccgtgaacggccacgagttcgagatcgagggcgagggcgagggccgcccctacgagggcacccagaccgccaagctgaaggtgaccaagggtggccccctgcccttcgcctgggacatcctgtcccctcagttcatgtacggctccaaggcctacgtgaagcaccccgccgacatccccgactacttgaagctgtccttccccgagggcttcaagtgggagcgcgtgatgaacttcgaggacggcggcgtggtgaccgtgacccaggactcctccctgcaggacggcgagttcatctacaaggtgaagctgcgcggcaccaacttcccctccgacggccccgtaatgcagaagaagaccatgggctgggaggcctcctccgagcggatgtaccccgaggacggcgccctgaagggcgagatcaagcagaggctgaagctgaaggacggcggccactacgacgctgaggtcaagaccacctacaaggccaagaagcccgtgcagctgcccggcgcctacaacgtcaacatcaagttggacatcacctcccacaacgaggactacaccatcgtggaacagtacgaacgcgccgagggccgccactccaccggcggcatggacgagctgtacaagtaacaccggtggcgcgttaagtcgacaatcaacctctggattacaaaatttgtgaaagattgactggtattcttaactatgttgctccttttacgctatgtggatacgctgctttaatgcctttgtatcatgctattgcttcccgtatggctttcattttctcctccttgtataaatcctggttgctgtctctttatgaggagttgtggcccgttgtcaggcaacgtggcgtggtgtgcactgtgtttgctgacgcaacccccactggttggggcattgccaccacctgtcagctcctttccgggactttcgctttccccctccctattgccacggcggaactcatcgccgcctgccttgcccgctgctggacaggggctcggctgttgggcactgacaattccgtggtgttgtcggggaaatcatcgtcctttccttggctgctcgcctgtgttgccacctggattctgcgcgggacgtccttctgctacgtcccttcggccctcaatccagcggaccttccttcccgcggcctgctgccggctctgcggcctcttccgcgtcttcgccttcgccctcagacgagtcggatctccctttgggccgcctccccgcgtcgactttaagaccaatgacttacaaggcagctgtagatcttagccactttttaaaagaaaaggggggactggaagggctaattcactcccaacgaagacaagatctgctttttgcttgtactgggtctctctggttagaccagatctgagcctgggagctctctggctaactagggaacccactgcttaagcctcaataaagcttgccttgagtgcttcaagtagtgtgtgcccgtctgttgtgtgactctggtaactagagatccctcagacccttttagtcagtgtggaaaatctctagcagtacgtatagtagttcatgtcatcttattattcagtatttataacttgcaaagaaatgaatatcagagagtgagaggaacttgtttattgcagcttataatggttacaaataaagcaatagcatcacaaatttcacaaataaagcatttttttcactgcattctagttgtggtttgtccaaactcatcaatgtatcttatcatgtctggctctagctatcccgcccctaactccgcccatcccgcccctaactccgcccagttccgcccattctccgccccatggctgactaattttttttatttatgcagaggccgaggccgcctcggcctctgagctattccagaagtagtgaggaggcttttttggaggcctagggacgtacccaattcgccctatagtgagtcgtattacgcgcgctcactggccgtcgttttacaacgtcgtgactgggaaaaccctggcgttacccaacttaatcgccttgcagcacatccccctttcgccagctggcgtaatagcgaagaggcccgcaccgatcgcccttcccaacagttgcgcagcctgaatggcgaatgggacgcgccctgtagcggcgcattaagcgcggcgggtgtggtggttacgcgcagcgtgaccgctacacttgccagcgccctagcgcccgctcctttcgctttcttcccttcctttctcgccacgttcgccggctttccccgtcaagctctaaatcgggggctccctttagggttccgatttagtgctttacggcacctcgaccccaaaaaacttgattagggtgatggttcacgtagtgggccatcgccctgatagacggtttttcgccctttgacgttggagtccacgttctttaatagtggactcttgttccaaactggaacaacactcaaccctatctcggtctattcttttgatttataagggattttgccgatttcggcctattggttaaaaaatgagctgatttaacaaaaatttaacgcgaattttaacaaaatattaacgcttacaatttaggtggcacttttcggggaaatgtgcgcggaacccctatttgtttatttttctaaatacattcaaatatgtatccgctcatgagacaataaccctgataaatgcttcaataatattgaaaaaggaagagtatgagtattcaacatttccgtgtcgcccttattcccttttttgcggcattttgccttcctgtttttgctcacccagaaacgctggtgaaagtaaaagatgctgaagatcagttgggtgcacgagtgggttacatcgaactggatctcaacagcggtaagatccttgagagttttcgccccgaagaacgttttccaatgatgagcacttttaaagttctgctatgtggcgcggtattatcccgtattgacgccgggcaagagcaactcggtcgccgcatacactattctcagaatgacttggttgagtactcaccagtcacagaaaagcatcttacggatggcatgacagtaagagaattatgcagtgctgccataaccatgagtgataacactgcggccaacttacttctgacaacgatcggaggaccgaaggagctaaccgcttttttgcacaacatgggggatcatgtaactcgccttgatcgttgggaaccggagctgaatgaagccataccaaacgacgagcgtgacaccacgatgcctgtagcaatggcaacaacgttgcgcaaactattaactggcgaactacttactctagcttcccggcaacaattaatagactggatggaggcggataaagttgcaggaccacttctgcgctcggcccttccggctggctggtttattgctgataaatctggagccggtgagcgtgggtctcgcggtatcattgcagcactggggccagatggtaagccctcccgtatcgtagttatctacacgacggggagtcaggcaactatggatgaacgaaatagacagatcgctgagataggtgcctcactgattaagcattggtaactgtcagaccaagtttactcatatatactttagattgatttaaaacttcatttttaatttaaaaggatctaggtgaagatcctttttgataatctcatgaccaaaatcccttaacgtgagttttcgttccactgagcgtcagaccccgtagaaaagatcaaaggatcttcttgagatcctttttttctgcgcgtaatctgctgcttgcaaacaaaaaaaccaccgctaccagcggtggtttgtttgccggatcaagagctaccaactctttttccgaaggtaactggcttcagcagagcgcagataccaaatactgttcttctagtgtagccgtagttaggccaccacttcaagaactctgtagcaccgcctacatacctcgctctgctaatcctgttaccagtggctgctgccagtggcgataagtcgtgtcttaccgggttggactcaagacgatagttaccggataaggcgcagcggtcgggctgaacggggggttcgtgcacacagcccagcttggagcgaacgacctacaccgaactgagatacctacagcgtgagctatgagaaagcgccacgcttcccgaagggagaaaggcggacaggtatccggtaagcggcagggtcggaacaggagagcgcacgagggagcttccagggggaaacgcctggtatctttatagtcctgtcgggtttcgccacctctgacttgagcgtcgatttttgtgatgctcgtcaggggggcggagcctatggaaaaacgccagcaacgcggcctttttacggttcctggccttttgctggccttttgctcacatgttctttcctgcgttatcccctgattctgtggataaccgtattaccgcctttgagtgagctgataccgctcgccgcagccgaacgaccgagcgcagcgagtcagtgagcgaggaagcggaagagcgcccaatacgcaaaccgcctctccccgcgcgttggccgattcattaatgcagctggcacgacaggtttcccgactggaaagcgggcagtgagcgcaacgcaattaatgtgagttagctcactcattaggcaccccaggctttacactttatgcttccggctcgtatgttgtgtggaattgtgagcggataacaatttcacacaggaaacagctatgaccatgattacgccaagcgcgcaattaaccctcactaaagggaacaaaagctggagctgcaagcttaatgtagtcttatgcaatactcttgtagtcttgcaacatggtaacgatgagttagcaacatgccttacaaggagagaaaaagcaccgtgcatgccgattggtggaagtaaggtggtacgatcgtgccttattaggaaggcaacagacgggtctgacatggattggacgaaccactgaattgccgcattgcagagatattgtatttaagtgcctagctcgatacataaacgggtctctctggttagaccagatctgagcctgggagctctctggctaactagggaacccactgcttaagcctcaataaagcttgccttgagtgcttcaagtagtgtgtgcccgtctgttgtgtgactctggtaactagagatccctcagacccttttagtcagtgtggaaaatctctagcagtggcgcccgaacagggacttgaaagcgaaagggaaaccagaggagctctctcgacgcaggactcggcttgctgaagcgcgcacggcaagaggcgaggggcggcgactggtgagtacgccaaaaattttgactagcggaggctagaaggagagagatgggtgcgagagcgtcagtattaagcgggggagaattagatcgcgatgggaaaaaattcggttaaggccagggggaaagaaaaaatataaattaaaacatatagtatgggcaagcagggagctagaacgattcgcagttaatcctggcctgttagaaacatcagaaggctgtagacaaatactgggacagctacaaccatcccttcagacaggatcagaagaacttagatcattatataatacagtagcaaccctctattgtgtgcatcaaaggatagagataaaagacaccaaggaagctttagacaagatagaggaagagcaaaacaaaagtaagaccaccgcacagcaagcggccgctgatcttcagacctggaggaggagatatgagggacaattggagaagtgaattatataaatataaagtagtaaaaattgaaccattaggagtagcacccaccaaggcaaagagaagagtggtgcagagagaaaaaagagcagtgggaataggagctttgttccttgggttcttgggagcagcaggaagcactatgggcgcagcgtcaatgacgctgacggtacaggccagacaattattgtctggtatagtgcagcagcagaacaatttgctgagggctattgaggcgcaacagcatctgttgcaactcacagtctggggcatcaagcagctccaggcaagaatcctggctgtggaaagatacctaaaggatcaacagctcctggggatttggggttgctctggaaaactcatttgcaccactgctgtgccttggaatgctagttggagtaataaatctctggaacagatttggaatcacacgacctggatggagtgggacagagaaattaacaattacacaagcttaatacactccttaattgaagaatcgcaaaaccagcaagaaaagaatgaacaagaattattggaattagataaatgggcaagtttgtggaattggtttaacataacaaattggctgtggtatataaaattattcataatgatagtaggaggcttggtaggtttaagaatagtttttgctgtactttctatagtgaatagagttaggcagggatattcaccattatcgtttcagacccacctcccaaccccgaggggacccttgcgccttttccaaggcagccctgggtttgcgcagggacgcggctgctctgggcgtggttccgggaaacgcagcggcgccgaccctgggtctcgcacattcttcacgtccgttcgcagcgtcacccggatcttcgccgctacccttgtgggccccccggcgacgcttcctgctccgcccctaagtcgggaaggttccttgcggttcgcggcgtgccggacgtgacaaacggaagccgcacgtctcactagtaccctcgcagacggacagcgccagggagcaatggcagcgcgccgaccgcgatgggctgtggccaatagcggctgctcagcagggcgcgccgagagcagcggccgggaaggggcggtgcgggaggcggggtgtggggcggtagtgtgggccctgttcctgcccgcgcggtgttccgcattctgcaagcctccggagcgcacgtcggcagtcggctccctcgttgaccgaatcaccgacctctctccccagggggtacccagctgtctagagaattctagatcttgagacaaatggcagtattcatccacaattttaaaagaaaaggggggattggggggtacagtgcaggggaaagaatagtagacataatagcaacagacatacaaactaaagaattacaaaaacaaattacaaaaattcaaaattttcgggtttattacagggacagcagagatccactttggcgccggctcgaggggg

SEQ ID NO: 55 - protein, 170 aa, Artificial Sequence
  Synthetic Polypeptide
MIKIATRKYLGKQNVYDIGVERDHNFALKNGFIASNCPFDHQAKHRIERARTRMEAGLVDQDDLDEEHQGLAPAELFARLKARMPDGDDLVVTHGDACLPNIMVENGRFSGFIDCGRLGVADRYQDIALATRDIAEELGGEWADRFLVLYGIAAPDSQRIAFYRLLDEFF

SEQ ID NO: 56 - DNA, 9534 bp, Artificial Sequence
  Synthetic Polynucleotide
cccggggttattaatagtaatcaattacggggtcattagttcatagcccatatatggagttccgcgttacataacttacggtaaatggcccgcctggctgaccgcccaacgacccccgcccattgacgtcaataatgacgtatgttcccatagtaacgccaatagggactttccattgacgtcaatgggtggagtatttacggtaaactgcccacttggcagtacatcaagtgtatcatatgccaagtacgccccctattgacgtcaatgacggtaaatggcccgcctggcattatgcccagtacatgaccttatgggactttcctacttggcagtacatctacgtattagtcatcgctattaccatggtgatgcggttttggcagtacatcaatgggcgtggatagcggtttgactcacggggatttccaagtctccaccccattgacgtcaatgggagtttgttttggcaccaaaatcaacgggactttccaaaatgtcgtaacaactccgccccattgacgcaaatgggcggtaggcgtgtacggtgggaggtctatataagcagagctctctggctaactgtcgggatcaacaagtttgtacaaaaaagcaggctccgaattcaccggtgccaccatgggatcggccattgaacaagatggattgcacgcaggttctccggccgcttgggtggagaggctattcggctatgactgggcacaacagacaatcggctgctctgatgccgccgtgttccggctgtcagcgcaggggcgcccggttctttttgtcaagaccgacctgtccggtgccctgaatgaactgcaggacgaggcagcgcggctatcgtggctggccacgacgggcgttccttgcgcagctgtgctcgacgttgtcactgaagcgggaagggactggctgctattgggcgaagtgccggggcaggatctcctgtcatctcaccttgctcctgccgagaaagtatccatcatggctgatgcaatgcggcggctgcatacgcttgatccggctacctgcccattcgaccaccaagcgaaacatcgcatcgagcgagcacgtactcggatggaagccggtcttgtcgatcaggatgatctggacgaagagcatcaggggctcgcgccagccgaactgttcgccaggctcaaggcgcgcatgcccgacggcgatgatctcgtcgtgacccatggcgatgcctgcctttcatacgagaccgagatcctgactgtcgagtacggattgcttcctatcggcaaaatcgtggagaagaggattgaatgtaccgtctattcagtcgataataatgggaacatctacacacagcccgtggctcaatggcacgacagaggagagcaggaagtttttgaatactgtctcgaggacggatccctcatccgcgctactaaagatcataagtttatgaccgtggacggccagatgctgccaattgacgaaatttttgaacgagagctggatctgatgagagtcgacaaccttccaaactgattaattaagaattcgacccagctttcttgtacaaagtggttggtaagcctatccctaaccctctcctcggtctcgattctacgtagtaatgagctagcagtctcgaggttaacgaattccgccccccccctaacgttactggccgaagccgcttggaataaggccggtgtgcgcttgtctatatgttattttccaccatattgccgtcttttggcaatgtgagggcccggaaacctggccctgtcttcttgacgagcattcctaggggtctttcccctctcgccaaaggaatgcaaggtctgttgaatgtcgtgaaggaagcagttcctctggaagcttcttgaagacaaacaacgtctgtagcgaccctttgcaggcagcggaaccccccacctggcgacaggtgcccctgcggccaaaagccacgtgtataagatacacctgcaaaggcggcacaaccccagtgccacgttgtgagttggatagttgtggaaagagtcaaatggctctcctcaagcgtattcaacaaggggctgaaggatgcccagaaggtaccccattgtatgggatctgatctggggcctcggtgcacatgctttacatgtgtttagtcgaggttaaaaaaacgtctaggccccccgaaccacggggacgtggttttcctttgaaaaacacgataataccatggccatgagcgagctgattaaggagaacatgcacatgaagctgtacatggagggcaccgtggacaaccatcacttcaagtgcacatccgagggcgaaggcaagccctacgagggcacccagaccatgagaatcaaggtggtcgagggcggccctctccccttcgccttcgacatcctggctactagcttcctctacggcagcaagaccttcatcaaccacacccagggcatccccgacttcttcaagcagtccttccctgagggcttcacatgggagagagtcaccacatacgaagacgggggcgtgctgaccgctacccaggacaccagcctccaggacggctgcctcatctacaacgtcaagatcagaggggtgaacttcacatccaacggccctgtgatgcagaagaaaacactcggctgggaggccttcaccgagacgctgtaccccgctgacggcggcctggaaggcagaaacgacatggccctgaagctcgtgggcgggagccatctgatcgcaaacatcaagaccacatatagatccaagaaacccgctaagaacctcaagatgcctggcgtctactatgtggactacagactggaaagaatcaaggaggccaacaacgagacctacgtcgagcagcacgaggtggcagtggccagatactgcgacctccctagcaaactggggcacaagcttaattaacaccggtggcgcgttaagtcgacaatcaacctctggattacaaaatttgtgaaagattgactggtattcttaactatgttgctccttttacgctatgtggatacgctgctttaatgcctttgtatcatgctattgcttcccgtatggctttcattttctcctccttgtataaatcctggttgctgtctctttatgaggagttgtggcccgttgtcaggcaacgtggcgtggtgtgcactgtgtttgctgacgcaacccccactggttggggcattgccaccacctgtcagctcctttccgggactttcgctttccccctccctattgccacggcggaactcatcgccgcctgccttgcccgctgctggacaggggctcggctgttgggcactgacaattccgtggtgttgtcggggaaatcatcgtcctttccttggctgctcgcctgtgttgccacctggattctgcgcgggacgtccttctgctacgtcccttcggccctcaatccagcggaccttccttcccgcggcctgctgccggctctgcggcctcttccgcgtcttcgccttcgccctcagacgagtcggatctccctttgggccgcctccccgcgtcgactttaagaccaatgacttacaaggcagctgtagatcttagccactttttaaaagaaaaggggggactggaagggctaattcactcccaacgaagacaagatctgctttttgcttgtactgggtctctctggttagaccagatctgagcctgggagctctctggctaactagggaacccactgcttaagcctcaataaagcttgccttgagtgcttcaagtagtgtgtgcccgtctgttgtgtgactctggtaactagagatccctcagacccttttagtcagtgtggaaaatctctagcagtacgtatagtagttcatgtcatcttattattcagtatttataacttgcaaagaaatgaatatcagagagtgagaggaacttgtttattgcagcttataatggttacaaataaagcaatagcatcacaaatttcacaaataaagcatttttttcactgcattctagttgtggtttgtccaaactcatcaatgtatcttatcatgtctggctctagctatcccgcccctaactccgcccatcccgcccctaactccgcccagttccgcccattctccgccccatggctgactaattttttttatttatgcagaggccgaggccgcctcggcctctgagctattccagaagtagtgaggaggcttttttggaggcctagggacgtacccaattcgccctatagtgagtcgtattacgcgcgctcactggccgtcgttttacaacgtcgtgactgggaaaaccctggcgttacccaacttaatcgccttgcagcacatccccctttcgccagctggcgtaatagcgaagaggcccgcaccgatcgcccttcccaacagttgcgcagcctgaatggcgaatgggacgcgccctgtagcggcgcattaagcgcggcgggtgtggtggttacgcgcagcgtgaccgctacacttgccagcgccctagcgcccgctcctttcgctttcttcccttcctttctcgccacgttcgccggctttccccgtcaagctctaaatcgggggctccctttagggttccgatttagtgctttacggcacctcgaccccaaaaaacttgattagggtgatggttcacgtagtgggccatcgccctgatagacggtttttcgccctttgacgttggagtccacgttctttaatagtggactcttgttccaaactggaacaacactcaaccctatctcggtctattcttttgatttataagggattttgccgatttcggcctattggttaaaaaatgagctgatttaacaaaaatttaacgcgaattttaacaaaatattaacgcttacaatttaggtggcacttttcggggaaatgtgcgcggaacccctatttgtttatttttctaaatacattcaaatatgtatccgctcatgagacaataaccctgataaatgcttcaataatattgaaaaaggaagagtatgagtattcaacatttccgtgtcgcccttattcccttttttgcggcattttgccttcctgtttttgctcacccagaaacgctggtgaaagtaaaagatgctgaagatcagttgggtgcacgagtgggttacatcgaactggatctcaacagcggtaagatccttgagagttttcgccccgaagaacgttttccaatgatgagcacttttaaagttctgctatgtggcgcggtattatcccgtattgacgccgggcaagagcaactcggtcgccgcatacactattctcagaatgacttggttgagtactcaccagtcacagaaaagcatcttacggatggcatgacagtaagagaattatgcagtgctgccataaccatgagtgataacactgcggccaacttacttctgacaacgatcggaggaccgaaggagctaaccgcttttttgcacaacatgggggatcatgtaactcgccttgatcgttgggaaccggagctgaatgaagccataccaaacgacgagcgtgacaccacgatgcctgtagcaatggcaacaacgttgcgcaaactattaactggcgaactacttactctagcttcccggcaacaattaatagactggatggaggcggataaagttgcaggaccacttctgcgctcggcccttccggctggctggtttattgctgataaatctggagccggtgagcgtgggtctcgcggtatcattgcagcactggggccagatggtaagccctcccgtatcgtagttatctacacgacggggagtcaggcaactatggatgaacgaaatagacagatcgctgagataggtgcctcactgattaagcattggtaactgtcagaccaagtttactcatatatactttagattgatttaaaacttcatttttaatttaaaaggatctaggtgaagatcctttttgataatctcatgaccaaaatcccttaacgtgagttttcgttccactgagcgtcagaccccgtagaaaagatcaaaggatcttcttgagatcctttttttctgcgcgtaatctgctgcttgcaaacaaaaaaaccaccgctaccagcggtggtttgtttgccggatcaagagctaccaactctttttccgaaggtaactggcttcagcagagcgcagataccaaatactgttcttctagtgtagccgtagttaggccaccacttcaagaactctgtagcaccgcctacatacctcgctctgctaatcctgttaccagtggctgctgccagtggcgataagtcgtgtcttaccgggttggactcaagacgatagttaccggataaggcgcagcggtcgggctgaacggggggttcgtgcacacagcccagcttggagcgaacgacctacaccgaactgagatacctacagcgtgagctatgagaaagcgccacgcttcccgaagggagaaaggcggacaggtatccggtaagcggcagggtcggaacaggagagcgcacgagggagcttccagggggaaacgcctggtatctttatagtcctgtcgggtttcgccacctctgacttgagcgtcgatttttgtgatgctcgtcaggggggcggagcctatggaaaaacgccagcaacgcggcctttttacggttcctggccttttgctggccttttgctcacatgttctttcctgcgttatcccctgattctgtggataaccgtattaccgcctttgagtgagctgataccgctcgccgcagccgaacgaccgagcgcagcgagtcagtgagcgaggaagcggaagagcgcccaatacgcaaaccgcctctccccgcgcgttggccgattcattaatgcagctggcacgacaggtttcccgactggaaagcgggcagtgagcgcaacgcaattaatgtgagttagctcactcattaggcaccccaggctttacactttatgcttccggctcgtatgttgtgtggaattgtgagcggataacaatttcacacaggaaacagctatgaccatgattacgccaagcgcgcaattaaccctcactaaagggaacaaaagctggagctgcaagcttaatgtagtcttatgcaatactcttgtagtcttgcaacatggtaacgatgagttagcaacatgccttacaaggagagaaaaagcaccgtgcatgccgattggtggaagtaaggtggtacgatcgtgccttattaggaaggcaacagacgggtctgacatggattggacgaaccactgaattgccgcattgcagagatattgtatttaagtgcctagctcgatacataaacgggtctctctggttagaccagatctgagcctgggagctctctggctaactagggaacccactgcttaagcctcaataaagcttgccttgagtgcttcaagtagtgtgtgcccgtctgttgtgtgactctggtaactagagatccctcagacccttttagtcagtgtggaaaatctctagcagtggcgcccgaacagggacttgaaagcgaaagggaaaccagaggagctctctcgacgcaggactcggcttgctgaagcgcgcacggcaagaggcgaggggcggcgactggtgagtacgccaaaaattttgactagcggaggctagaaggagagagatgggtgcgagagcgtcagtattaagcgggggagaattagatcgcgatgggaaaaaattcggttaaggccagggggaaagaaaaaatataaattaaaacatatagtatgggcaagcagggagctagaacgattcgcagttaatcctggcctgttagaaacatcagaaggctgtagacaaatactgggacagctacaaccatcccttcagacaggatcagaagaacttagatcattatataatacagtagcaaccctctattgtgtgcatcaaaggatagagataaaagacaccaaggaagctttagacaagatagaggaagagcaaaacaaaagtaagaccaccgcacagcaagcggccgctgatcttcagacctggaggaggagatatgagggacaattggagaagtgaattatataaatataaagtagtaaaaattgaaccattaggagtagcacccaccaaggcaaagagaagagtggtgcagagagaaaaaagagcagtgggaataggagctttgttccttgggttcttgggagcagcaggaagcactatgggcgcagcgtcaatgacgctgacggtacaggccagacaattattgtctggtatagtgcagcagcagaacaatttgctgagggctattgaggcgcaacagcatctgttgcaactcacagtctggggcatcaagcagctccaggcaagaatcctggctgtggaaagatacctaaaggatcaacagctcctggggatttggggttgctctggaaaactcatttgcaccactgctgtgccttggaatgctagttggagtaataaatctctggaacagatttggaatcacacgacctggatggagtgggacagagaaattaacaattacacaagcttaatacactccttaattgaagaatcgcaaaaccagcaagaaaagaatgaacaagaattattggaattagataaatgggcaagtttgtggaattggtttaacataacaaattggctgtggtatataaaattattcataatgatagtaggaggcttggtaggtttaagaatagtttttgctgtactttctatagtgaatagagttaggcagggatattcaccattatcgtttcagacccacctcccaaccccgaggggacccttgcgccttttccaaggcagccctgggtttgcgcagggacgcggctgctctgggcgtggttccgggaaacgcagcggcgccgaccctgggtctcgcacattcttcacgtccgttcgcagcgtcacccggatcttcgccgctacccttgtgggccccccggcgacgcttcctgctccgcccctaagtcgggaaggttccttgcggttcgcggcgtgccggacgtgacaaacggaagccgcacgtctcactagtaccctcgcagacggacagcgccagggagcaatggcagcgcgccgaccgcgatgggctgtggccaatagcggctgctcagcagggcgcgccgagagcagcggccgggaaggggcggtgcgggaggcggggtgtggggcggtagtgtgggccctgttcctgcccgcgcggtgttccgcattctgcaagcctccggagcgcacgtcggcagtcggctccctcgttgaccgaatcaccgacctctctccccagggggtacccagctgtctagagaattctagatcttgagacaaatggcagtattcatccacaattttaaaagaaaaggggggattggggggtacagtgcaggggaaagaatagtagacataatagcaacagacatacaaactaaagaattacaaaaacaaattacaaaaattcaaaattttcgggtttattacagggacagcagagatccactttggcgccggctcgaggggg

SEQ ID NO: 57 - protein, 296 aa, Artificial Sequence
  Synthetic Polypeptide
MGSAIEQDGLHAGSPAAWVERLFGYDWAQQTIGCSDAAVFRLSAQGRPVLFVKTDLSGALNELQDEAARLSWLATTGVPCAAVLDVVTEAGRDWLLLGEVPGQDLLSSHLAPAEKVSIMADAMRRLHTLDPATCPFDHQAKHRIERARTRMEAGLVDQDDLDEEHQGLAPAELFARLKARMPDGDDLVVTHGDACLSYETEILTVEYGLLPIGKIVEKRIECTVYSVDNNGNIYTQPVAQWHDRGEQEVFEYCLEDGSLIRATKDHKFMTVDGQMLPIDEIFERELDLMRVDNLPN

SEQ ID NO: 58 - DNA, 8979 bp, Artificial Sequence
  Synthetic Polynucleotide
cccggggttattaatagtaatcaattacggggtcattagttcatagcccatatatggagttccgcgttacataacttacggtaaatggcccgcctggctgaccgcccaacgacccccgcccattgacgtcaataatgacgtatgttcccatagtaacgccaatagggactttccattgacgtcaatgggtggagtatttacggtaaactgcccacttggcagtacatcaagtgtatcatatgccaagtacgccccctattgacgtcaatgacggtaaatggcccgcctggcattatgcccagtacatgaccttatgggactttcctacttggcagtacatctacgtattagtcatcgctattaccatggtgatgcggttttggcagtacatcaatgggcgtggatagcggtttgactcacggggatttccaagtctccaccccattgacgtcaatgggagtttgttttggcaccaaaatcaacgggactttccaaaatgtcgtaacaactccgccccattgacgcaaatgggcggtaggcgtgtacggtgggaggtctatataagcagagctctctggctaactgtcgggatcaacaagtttgtacaaaaaagcaggctccgaattcaccggtgccgccaccatgattaagatcgctacgcggaagtacctggggaaacagaacgtctacgacataggtgtggagcgcgatcacaactttgctctgaaaaatggatttatcgccagcaactgcttgccgaatatcatggtggaaaatggccgcttttctggattcatcgactgtggccggctgggtgtggcggaccgctatcaggacatagcgttggctacccgtgatattgctgaagagcttggcggcgaatgggctgaccgcttcctcgtgctttacggtatcgccgctcccgattcgcagcgcatcgccttctatcgccttcttgacgagttcttctgattaattaagaattcgacccagctttcttgtacaaagtggttggtaagcctatccctaaccctctcctcggtctcgattctacgtagtaatgagctagcagtctcgaggttaacgaattccgccccccccctaacgttactggccgaagccgcttggaataaggccggtgtgcgcttgtctatatgttattttccaccatattgccgtcttttggcaatgtgagggcccggaaacctggccctgtcttcttgacgagcattcctaggggtctttcccctctcgccaaaggaatgcaaggtctgttgaatgtcgtgaaggaagcagttcctctggaagcttcttgaagacaaacaacgtctgtagcgaccctttgcaggcagcggaaccccccacctggcgacaggtgcccctgcggccaaaagccacgtgtataagatacacctgcaaaggcggcacaaccccagtgccacgttgtgagttggatagttgtggaaagagtcaaatggctctcctcaagcgtattcaacaaggggctgaaggatgcccagaaggtaccccattgtatgggatctgatctggggcctcggtgcacatgctttacatgtgtttagtcgaggttaaaaaaacgtctaggccccccgaaccacggggacgtggttttcctttgaaaaacacgataataccatggtgagcaagggcgaggaggataacatggccatcatcaaggagttcatgcgcttcaaggtgcacatggagggctccgtgaacggccacgagttcgagatcgagggcgagggcgagggccgcccctacgagggcacccagaccgccaagctgaaggtgaccaagggtggccccctgcccttcgcctgggacatcctgtcccctcagttcatgtacggctccaaggcctacgtgaagcaccccgccgacatccccgactacttgaagctgtccttccccgagggcttcaagtgggagcgcgtgatgaacttcgaggacggcggcgtggtgaccgtgacccaggactcctccctgcaggacggcgagttcatctacaaggtgaagctgcgcggcaccaacttcccctccgacggccccgtaatgcagaagaagaccatgggctgggaggcctcctccgagcggatgtaccccgaggacggcgccctgaagggcgagatcaagcagaggctgaagctgaaggacggcggccactacgacgctgaggtcaagaccacctacaaggccaagaagcccgtgcagctgcccggcgcctacaacgtcaacatcaagttggacatcacctcccacaacgaggactacaccatcgtggaacagtacgaacgcgccgagggccgccactccaccggcggcatggacgagctgtacaagtaacaccggtggcgcgttaagtcgacaatcaacctctggattacaaaatttgtgaaagattgactggtattcttaactatgttgctccttttacgctatgtggatacgctgctttaatgcctttgtatcatgctattgcttcccgtatggctttcattttctcctccttgtataaatcctggttgctgtctctttatgaggagttgtggcccgttgtcaggcaacgtggcgtggtgtgcactgtgtttgctgacgcaacccccactggttggggcattgccaccacctgtcagctcctttccgggactttcgctttccccctccctattgccacggcggaactcatcgccgcctgccttgcccgctgctggacaggggctcggctgttgggcactgacaattccgtggtgttgtcggggaaatcatcgtcctttccttggctgctcgcctgtgttgccacctggattctgcgcgggacgtccttctgctacgtcccttcggccctcaatccagcggaccttccttcccgcggcctgctgccggctctgcggcctcttccgcgtcttcgccttcgccctcagacgagtcggatctccctttgggccgcctccccgcgtcgactttaagaccaatgacttacaaggcagctgtagatcttagccactttttaaaagaaaaggggggactggaagggctaattcactcccaacgaagacaagatctgctttttgcttgtactgggtctctctggttagaccagatctgagcctgggagctctctggctaactagggaacccactgcttaagcctcaataaagcttgccttgagtgcttcaagtagtgtgtgcccgtctgttgtgtgactctggtaactagagatccctcagacccttttagtcagtgtggaaaatctctagcagtacgtatagtagttcatgtcatcttattattcagtatttataacttgcaaagaaatgaatatcagagagtgagaggaacttgtttattgcagcttataatggttacaaataaagcaatagcatcacaaatttcacaaataaagcatttttttcactgcattctagttgtggtttgtccaaactcatcaatgtatcttatcatgtctggctctagctatcccgcccctaactccgcccatcccgcccctaactccgcccagttccgcccattctccgccccatggctgactaattttttttatttatgcagaggccgaggccgcctcggcctctgagctattccagaagtagtgaggaggcttttttggaggcctagggacgtacccaattcgccctatagtgagtcgtattacgcgcgctcactggccgtcgttttacaacgtcgtgactgggaaaaccctggcgttacccaacttaatcgccttgcagcacatccccctttcgccagctggcgtaatagcgaagaggcccgcaccgatcgcccttcccaacagttgcgcagcctgaatggcgaatgggacgcgccctgtagcggcgcattaagcgcggcgggtgtggtggttacgcgcagcgtgaccgctacacttgccagcgccctagcgcccgctcctttcgctttcttcccttcctttctcgccacgttcgccggctttccccgtcaagctctaaatcgggggctccctttagggttccgatttagtgctttacggcacctcgaccccaaaaaacttgattagggtgatggttcacgtagtgggccatcgccctgatagacggtttttcgccctttgacgttggagtccacgttctttaatagtggactcttgttccaaactggaacaacactcaaccctatctcggtctattcttttgatttataagggattttgccgatttcggcctattggttaaaaaatgagctgatttaacaaaaatttaacgcgaattttaacaaaatattaacgcttacaatttaggtggcacttttcggggaaatgtgcgcggaacccctatttgtttatttttctaaatacattcaaatatgtatccgctcatgagacaataaccctgataaatgcttcaataatattgaaaaaggaagagtatgagtattcaacatttccgtgtcgcccttattcccttttttgcggcattttgccttcctgtttttgctcacccagaaacgctggtgaaagtaaaagatgctgaagatcagttgggtgcacgagtgggttacatcgaactggatctcaacagcggtaagatccttgagagttttcgccccgaagaacgttttccaatgatgagcacttttaaagttctgctatgtggcgcggtattatcccgtattgacgccgggcaagagcaactcggtcgccgcatacactattctcagaatgacttggttgagtactcaccagtcacagaaaagcatcttacggatggcatgacagtaagagaattatgcagtgctgccataaccatgagtgataacactgcggccaacttacttctgacaacgatcggaggaccgaaggagctaaccgcttttttgcacaacatgggggatcatgtaactcgccttgatcgttgggaaccggagctgaatgaagccataccaaacgacgagcgtgacaccacgatgcctgtagcaatggcaacaacgttgcgcaaactattaactggcgaactacttactctagcttcccggcaacaattaatagactggatggaggcggataaagttgcaggaccacttctgcgctcggcccttccggctggctggtttattgctgataaatctggagccggtgagcgtgggtctcgcggtatcattgcagcactggggccagatggtaagccctcccgtatcgtagttatctacacgacggggagtcaggcaactatggatgaacgaaatagacagatcgctgagataggtgcctcactgattaagcattggtaactgtcagaccaagtttactcatatatactttagattgatttaaaacttcatttttaatttaaaaggatctaggtgaagatcctttttgataatctcatgaccaaaatcccttaacgtgagttttcgttccactgagcgtcagaccccgtagaaaagatcaaaggatcttcttgagatcctttttttctgcgcgtaatctgctgcttgcaaacaaaaaaaccaccgctaccagcggtggtttgtttgccggatcaagagctaccaactctttttccgaaggtaactggcttcagcagagcgcagataccaaatactgttcttctagtgtagccgtagttaggccaccacttcaagaactctgtagcaccgcctacatacctcgctctgctaatcctgttaccagtggctgctgccagtggcgataagtcgtgtcttaccgggttggactcaagacgatagttaccggataaggcgcagcggtcgggctgaacggggggttcgtgcacacagcccagcttggagcgaacgacctacaccgaactgagatacctacagcgtgagctatgagaaagcgccacgcttcccgaagggagaaaggcggacaggtatccggtaagcggcagggtcggaacaggagagcgcacgagggagcttccagggggaaacgcctggtatctttatagtcctgtcgggtttcgccacctctgacttgagcgtcgatttttgtgatgctcgtcaggggggcggagcctatggaaaaacgccagcaacgcggcctttttacggttcctggccttttgctggccttttgctcacatgttctttcctgcgttatcccctgattctgtggataaccgtattaccgcctttgagtgagctgataccgctcgccgcagccgaacgaccgagcgcagcgagtcagtgagcgaggaagcggaagagcgcccaatacgcaaaccgcctctccccgcgcgttggccgattcattaatgcagctggcacgacaggtttcccgactggaaagcgggcagtgagcgcaacgcaattaatgtgagttagctcactcattaggcaccccaggctttacactttatgcttccggctcgtatgttgtgtggaattgtgagcggataacaatttcacacaggaaacagctatgaccatgattacgccaagcgcgcaattaaccctcactaaagggaacaaaagctggagctgcaagcttaatgtagtcttatgcaatactcttgtagtcttgcaacatggtaacgatgagttagcaacatgccttacaaggagagaaaaagcaccgtgcatgccgattggtggaagtaaggtggtacgatcgtgccttattaggaaggcaacagacgggtctgacatggattggacgaaccactgaattgccgcattgcagagatattgtatttaagtgcctagctcgatacataaacgggtctctctggttagaccagatctgagcctgggagctctctggctaactagggaacccactgcttaagcctcaataaagcttgccttgagtgcttcaagtagtgtgtgcccgtctgttgtgtgactctggtaactagagatccctcagacccttttagtcagtgtggaaaatctctagcagtggcgcccgaacagggacttgaaagcgaaagggaaaccagaggagctctctcgacgcaggactcggcttgctgaagcgcgcacggcaagaggcgaggggcggcgactggtgagtacgccaaaaattttgactagcggaggctagaaggagagagatgggtgcgagagcgtcagtattaagcgggggagaattagatcgcgatgggaaaaaattcggttaaggccagggggaaagaaaaaatataaattaaaacatatagtatgggcaagcagggagctagaacgattcgcagttaatcctggcctgttagaaacatcagaaggctgtagacaaatactgggacagctacaaccatcccttcagacaggatcagaagaacttagatcattatataatacagtagcaaccctctattgtgtgcatcaaaggatagagataaaagacaccaaggaagctttagacaagatagaggaagagcaaaacaaaagtaagaccaccgcacagcaagcggccgctgatcttcagacctggaggaggagatatgagggacaattggagaagtgaattatataaatataaagtagtaaaaattgaaccattaggagtagcacccaccaaggcaaagagaagagtggtgcagagagaaaaaagagcagtgggaataggagctttgttccttgggttcttgggagcagcaggaagcactatgggcgcagcgtcaatgacgctgacggtacaggccagacaattattgtctggtatagtgcagcagcagaacaatttgctgagggctattgaggcgcaacagcatctgttgcaactcacagtctggggcatcaagcagctccaggcaagaatcctggctgtggaaagatacctaaaggatcaacagctcctggggatttggggttgctctggaaaactcatttgcaccactgctgtgccttggaatgctagttggagtaataaatctctggaacagatttggaatcacacgacctggatggagtgggacagagaaattaacaattacacaagcttaatacactccttaattgaagaatcgcaaaaccagcaagaaaagaatgaacaagaattattggaattagataaatgggcaagtttgtggaattggtttaacataacaaattggctgtggtatataaaattattcataatgatagtaggaggcttggtaggtttaagaatagtttttgctgtactttctatagtgaatagagttaggcagggatattcaccattatcgtttcagacccacctcccaaccccgaggggacccttgcgccttttccaaggcagccctgggtttgcgcagggacgcggctgctctgggcgtggttccgggaaacgcagcggcgccgaccctgggtctcgcacattcttcacgtccgttcgcagcgtcacccggatcttcgccgctacccttgtgggccccccggcgacgcttcctgctccgcccctaagtcgggaaggttccttgcggttcgcggcgtgccggacgtgacaaacggaagccgcacgtctcactagtaccctcgcagacggacagcgccagggagcaatggcagcgcgccgaccgcgatgggctgtggccaatagcggctgctcagcagggcgcgccgagagcagcggccgggaaggggcggtgcgggaggcggggtgtggggcggtagtgtgggccctgttcctgcccgcgcggtgttccgcattctgcaagcctccggagcgcacgtcggcagtcggctccctcgttgaccgaatcaccgacctctctccccagggggtacccagctgtctagagaattctagatcttgagacaaatggcagtattcatccacaattttaaaagaaaaggggggattggggggtacagtgcaggggaaagaatagtagacataatagcaacagacatacaaactaaagaattacaaaaacaaattacaaaaattcaaaattttcgggtttattacagggacagcagagatccactttggcgccggctcgaggggg

SEQ ID NO: 59 - protein, 109 aa, Artificial Sequence
  Synthetic Polypeptide
MIKIATRKYLGKQNVYDIGVERDHNFALKNGFIASNCLPNIMVENGRFSGFIDCGRLGVADRYQDIALATRDIAEELGGEWADRFLVLYGIAAPDSQRIAFYRLLDEFF

SEQ ID NO: 60 - DNA, 9186 bp, Artificial Sequence
  Synthetic Polynucleotide
cccggggttattaatagtaatcaattacggggtcattagttcatagcccatatatggagttccgcgttacataacttacggtaaatggcccgcctggctgaccgcccaacgacccccgcccattgacgtcaataatgacgtatgttcccatagtaacgccaatagggactttccattgacgtcaatgggtggagtatttacggtaaactgcccacttggcagtacatcaagtgtatcatatgccaagtacgccccctattgacgtcaatgacggtaaatggcccgcctggcattatgcccagtacatgaccttatgggactttcctacttggcagtacatctacgtattagtcatcgctattaccatggtgatgcggttttggcagtacatcaatgggcgtggatagcggtttgactcacggggatttccaagtctccaccccattgacgtcaatgggagtttgttttggcaccaaaatcaacgggactttccaaaatgtcgtaacaactccgccccattgacgcaaatgggcggtaggcgtgtacggtgggaggtctatataagcagagctctctggctaactgtcgggatcaacaagtttgtacaaaaaagcaggctccgaattcaccggtgccgccaccatgattaagatcgctacgcggaagtacctggggaaacagaacgtctacgacataggtgtggagcgcgatcacaactttgctctgaaaaatggatttatcgccagcaactgcgccgatggtttctacaaagatcgttatgtttatcggcactttgcatcggccgcgctcccgattccggaagtgcttgacattggggaatttagcgagagcctgacctattgcctttcatacgagaccgagatcctgactgtcgagtacggattgcttcctatcggcaaaatcgtggagaagaggattgaatgtaccgtctattcagtcgataataatgggaacatctacacacagcccgtggctcaatggcacgacagaggagagcaggaagtttttgaatactgtctcgaggacggatccctcatccgcgctactaaagatcataagtttatgaccgtggacggccagatgctgccaattgacgaaatttttgaacgagagctggatctgatgagagtcgacaaccttccaaactgattaattaagaattcgacccagctttcttgtacaaagtggttggtaagcctatccctaaccctctcctcggtctcgattctacgtagtaatgagctagcagtctcgaggttaacgaattccgccccccccctaacgttactggccgaagccgcttggaataaggccggtgtgcgcttgtctatatgttattttccaccatattgccgtcttttggcaatgtgagggcccggaaacctggccctgtcttcttgacgagcattcctaggggtctttcccctctcgccaaaggaatgcaaggtctgttgaatgtcgtgaaggaagcagttcctctggaagcttcttgaagacaaacaacgtctgtagcgaccctttgcaggcagcggaaccccccacctggcgacaggtgcccctgcggccaaaagccacgtgtataagatacacctgcaaaggcggcacaaccccagtgccacgttgtgagttggatagttgtggaaagagtcaaatggctctcctcaagcgtattcaacaaggggctgaaggatgcccagaaggtaccccattgtatgggatctgatctggggcctcggtgcacatgctttacatgtgtttagtcgaggttaaaaaaacgtctaggccccccgaaccacggggacgtggttttcctttgaaaaacacgataataccatggtgagcaagggcgaggagctgttcaccggggtggtgcccatcctggtcgagctggacggcgacgtaaacggccacaagttcagcgtgtccggcgagggcgagggcgatgccacctacggcaagctgaccctgaagttcatctgcaccaccggcaagctgcccgtgccctggcccaccctcgtgaccaccctgacctacggcgtgcagtgcttcagccgctaccccgaccacatgaagcagcacgacttcttcaagtccgccatgcccgaaggctacgtccaggagcgcaccatcttcttcaaggacgacggcaactacaagacccgcgccgaggtgaagttcgagggcgacaccctggtgaaccgcatcgagctgaagggcatcgacttcaaggaggacggcaacatcctggggcacaagctggagtacaactacaacagccacaacgtctatatcatggccgacaagcagaagaacggcatcaaggtgaacttcaagatccgccacaacatcgaggacggcagcgtgcagctcgccgaccactaccagcagaacacccccatcggcgacggccccgtgctgctgcccgacaaccactacctgagcacccagtccgccctgagcaaagaccccaacgagaagcgcgatcacatggtcctgctggagttcgtgaccgccgccgggatcactctcggcatggacgagctgtacaagtaacaccggtggcgcgttaagtcgacaatcaacctctggattacaaaatttgtgaaagattgactggtattcttaactatgttgctccttttacgctatgtggatacgctgctttaatgcctttgtatcatgctattgcttcccgtatggctttcattttctcctccttgtataaatcctggttgctgtctctttatgaggagttgtggcccgttgtcaggcaacgtggcgtggtgtgcactgtgtttgctgacgcaacccccactggttggggcattgccaccacctgtcagctcctttccgggactttcgctttccccctccctattgccacggcggaactcatcgccgcctgccttgcccgctgctggacaggggctcggctgttgggcactgacaattccgtggtgttgtcggggaaatcatcgtcctttccttggctgctcgcctgtgttgccacctggattctgcgcgggacgtccttctgctacgtcccttcggccctcaatccagcggaccttccttcccgcggcctgctgccggctctgcggcctcttccgcgtcttcgccttcgccctcagacgagtcggatctccctttgggccgcctccccgcgtcgactttaagaccaatgacttacaaggcagctgtagatcttagccactttttaaaagaaaaggggggactggaagggctaattcactcccaacgaagacaagatctgctttttgcttgtactgggtctctctggttagaccagatctgagcctgggagctctctggctaactagggaacccactgcttaagcctcaataaagcttgccttgagtgcttcaagtagtgtgtgcccgtctgttgtgtgactctggtaactagagatccctcagacccttttagtcagtgtggaaaatctctagcagtacgtatagtagttcatgtcatcttattattcagtatttataacttgcaaagaaatgaatatcagagagtgagaggaacttgtttattgcagcttataatggttacaaataaagcaatagcatcacaaatttcacaaataaagcatttttttcactgcattctagttgtggtttgtccaaactcatcaatgtatcttatcatgtctggctctagctatcccgcccctaactccgcccatcccgcccctaactccgcccagttccgcccattctccgccccatggctgactaattttttttatttatgcagaggccgaggccgcctcggcctctgagctattccagaagtagtgaggaggcttttttggaggcctagggacgtacccaattcgccctatagtgagtcgtattacgcgcgctcactggccgtcgttttacaacgtcgtgactgggaaaaccctggcgttacccaacttaatcgccttgcagcacatccccctttcgccagctggcgtaatagcgaagaggcccgcaccgatcgcccttcccaacagttgcgcagcctgaatggcgaatgggacgcgccctgtagcggcgcattaagcgcggcgggtgtggtggttacgcgcagcgtgaccgctacacttgccagcgccctagcgcccgctcctttcgctttcttcccttcctttctcgccacgttcgccggctttccccgtcaagctctaaatcgggggctccctttagggttccgatttagtgctttacggcacctcgaccccaaaaaacttgattagggtgatggttcacgtagtgggccatcgccctgatagacggtttttcgccctttgacgttggagtccacgttctttaatagtggactcttgttccaaactggaacaacactcaaccctatctcggtctattcttttgatttataagggattttgccgatttcggcctattggttaaaaaatgagctgatttaacaaaaatttaacgcgaattttaacaaaatattaacgcttacaatttaggtggcacttttcggggaaatgtgcgcggaacccctatttgtttatttttctaaatacattcaaatatgtatccgctcatgagacaataaccctgataaatgcttcaataatattgaaaaaggaagagtatgagtattcaacatttccgtgtcgcccttattcccttttttgcggcattttgccttcctgtttttgctcacccagaaacgctggtgaaagtaaaagatgctgaagatcagttgggtgcacgagtgggttacatcgaactggatctcaacagcggtaagatccttgagagttttcgccccgaagaacgttttccaatgatgagcacttttaaagttctgctatgtggcgcggtattatcccgtattgacgccgggcaagagcaactcggtcgccgcatacactattctcagaatgacttggttgagtactcaccagtcacagaaaagcatcttacggatggcatgacagtaagagaattatgcagtgctgccataaccatgagtgataacactgcggccaacttacttctgacaacgatcggaggaccgaaggagctaaccgcttttttgcacaacatgggggatcatgtaactcgccttgatcgttgggaaccggagctgaatgaagccataccaaacgacgagcgtgacaccacgatgcctgtagcaatggcaacaacgttgcgcaaactattaactggcgaactacttactctagcttcccggcaacaattaatagactggatggaggcggataaagttgcaggaccacttctgcgctcggcccttccggctggctggtttattgctgataaatctggagccggtgagcgtgggtctcgcggtatcattgcagcactggggccagatggtaagccctcccgtatcgtagttatctacacgacggggagtcaggcaactatggatgaacgaaatagacagatcgctgagataggtgcctcactgattaagcattggtaactgtcagaccaagtttactcatatatactttagattgatttaaaacttcatttttaatttaaaaggatctaggtgaagatcctttttgataatctcatgaccaaaatcccttaacgtgagttttcgttccactgagcgtcagaccccgtagaaaagatcaaaggatcttcttgagatcctttttttctgcgcgtaatctgctgcttgcaaacaaaaaaaccaccgctaccagcggtggtttgtttgccggatcaagagctaccaactctttttccgaaggtaactggcttcagcagagcgcagataccaaatactgttcttctagtgtagccgtagttaggccaccacttcaagaactctgtagcaccgcctacatacctcgctctgctaatcctgttaccagtggctgctgccagtggcgataagtcgtgtcttaccgggttggactcaagacgatagttaccggataaggcgcagcggtcgggctgaacggggggttcgtgcacacagcccagcttggagcgaacgacctacaccgaactgagatacctacagcgtgagctatgagaaagcgccacgcttcccgaagggagaaaggcggacaggtatccggtaagcggcagggtcggaacaggagagcgcacgagggagcttccagggggaaacgcctggtatctttatagtcctgtcgggtttcgccacctctgacttgagcgtcgatttttgtgatgctcgtcaggggggcggagcctatggaaaaacgccagcaacgcggcctttttacggttcctggccttttgctggccttttgctcacatgttctttcctgcgttatcccctgattctgtggataaccgtattaccgcctttgagtgagctgataccgctcgccgcagccgaacgaccgagcgcagcgagtcagtgagcgaggaagcggaagagcgcccaatacgcaaaccgcctctccccgcgcgttggccgattcattaatgcagctggcacgacaggtttcccgactggaaagcgggcagtgagcgcaacgcaattaatgtgagttagctcactcattaggcaccccaggctttacactttatgcttccggctcgtatgttgtgtggaattgtgagcggataacaatttcacacaggaaacagctatgaccatgattacgccaagcgcgcaattaaccctcactaaagggaacaaaagctggagctgcaagcttaatgtagtcttatgcaatactcttgtagtcttgcaacatggtaacgatgagttagcaacatgccttacaaggagagaaaaagcaccgtgcatgccgattggtggaagtaaggtggtacgatcgtgccttattaggaaggcaacagacgggtctgacatggattggacgaaccactgaattgccgcattgcagagatattgtatttaagtgcctagctcgatacataaacgggtctctctggttagaccagatctgagcctgggagctctctggctaactagggaacccactgcttaagcctcaataaagcttgccttgagtgcttcaagtagtgtgtgcccgtctgttgtgtgactctggtaactagagatccctcagacccttttagtcagtgtggaaaatctctagcagtggcgcccgaacagggacttgaaagcgaaagggaaaccagaggagctctctcgacgcaggactcggcttgctgaagcgcgcacggcaagaggcgaggggcggcgactggtgagtacgccaaaaattttgactagcggaggctagaaggagagagatgggtgcgagagcgtcagtattaagcgggggagaattagatcgcgatgggaaaaaattcggttaaggccagggggaaagaaaaaatataaattaaaacatatagtatgggcaagcagggagctagaacgattcgcagttaatcctggcctgttagaaacatcagaaggctgtagacaaatactgggacagctacaaccatcccttcagacaggatcagaagaacttagatcattatataatacagtagcaaccctctattgtgtgcatcaaaggatagagataaaagacaccaaggaagctttagacaagatagaggaagagcaaaacaaaagtaagaccaccgcacagcaagcggccgctgatcttcagacctggaggaggagatatgagggacaattggagaagtgaattatataaatataaagtagtaaaaattgaaccattaggagtagcacccaccaaggcaaagagaagagtggtgcagagagaaaaaagagcagtgggaataggagctttgttccttgggttcttgggagcagcaggaagcactatgggcgcagcgtcaatgacgctgacggtacaggccagacaattattgtctggtatagtgcagcagcagaacaatttgctgagggctattgaggcgcaacagcatctgttgcaactcacagtctggggcatcaagcagctccaggcaagaatcctggctgtggaaagatacctaaaggatcaacagctcctggggatttggggttgctctggaaaactcatttgcaccactgctgtgccttggaatgctagttggagtaataaatctctggaacagatttggaatcacacgacctggatggagtgggacagagaaattaacaattacacaagcttaatacactccttaattgaagaatcgcaaaaccagcaagaaaagaatgaacaagaattattggaattagataaatgggcaagtttgtggaattggtttaacataacaaattggctgtggtatataaaattattcataatgatagtaggaggcttggtaggtttaagaatagtttttgctgtactttctatagtgaatagagttaggcagggatattcaccattatcgtttcagacccacctcccaaccccgaggggacccttgcgccttttccaaggcagccctgggtttgcgcagggacgcggctgctctgggcgtggttccgggaaacgcagcggcgccgaccctgggtctcgcacattcttcacgtccgttcgcagcgtcacccggatcttcgccgctacccttgtgggccccccggcgacgcttcctgctccgcccctaagtcgggaaggttccttgcggttcgcggcgtgccggacgtgacaaacggaagccgcacgtctcactagtaccctcgcagacggacagcgccagggagcaatggcagcgcgccgaccgcgatgggctgtggccaatagcggctgctcagcagggcgcgccgagagcagcggccgggaaggggcggtgcgggaggcggggtgtggggcggtagtgtgggccctgttcctgcccgcgcggtgttccgcattctgcaagcctccggagcgcacgtcggcagtcggctccctcgttgaccgaatcaccgacctctctccccagggggtacccagctgtctagagaattctagatcttgagacaaatggcagtattcatccacaattttaaaagaaaaggggggattggggggtacagtgcaggggaaagaatagtagacataatagcaacagacatacaaactaaagaattacaaaaacaaattacaaaaattcaaaattttcgggtttattacagggacagcagagatccactttggcgccggctcgaggggg

SEQ ID NO: 61 - protein, 175 aa, Artificial Sequence
  Synthetic Polypeptide
MIKIATRKYLGKQNVYDIGVERDHNFALKNGFIASNCADGFYKDRYVYRHFASAALPIPEVLDIGEFSESLTYCLSYETEILTVEYGLLPIGKIVEKRIECTVYSVDNNGNIYTQPVAQWHDRGEQEVFEYCLEDGSLIRATKDHKFMTVDGQMLPIDEIFERELDLMRVDNLPN

SEQ ID NO: 62 - DNA, 9528 bp, Artificial Sequence
  Synthetic Polynucleotide
cccggggttattaatagtaatcaattacggggtcattagttcatagcccatatatggagttccgcgttacataacttacggtaaatggcccgcctggctgaccgcccaacgacccccgcccattgacgtcaataatgacgtatgttcccatagtaacgccaatagggactttccattgacgtcaatgggtggagtatttacggtaaactgcccacttggcagtacatcaagtgtatcatatgccaagtacgccccctattgacgtcaatgacggtaaatggcccgcctggcattatgcccagtacatgaccttatgggactttcctacttggcagtacatctacgtattagtcatcgctattaccatggtgatgcggttttggcagtacatcaatgggcgtggatagcggtttgactcacggggatttccaagtctccaccccattgacgtcaatgggagtttgttttggcaccaaaatcaacgggactttccaaaatgtcgtaacaactccgccccattgacgcaaatgggcggtaggcgtgtacggtgggaggtctatataagcagagctctctggctaactgtcgggatcaacaagtttgtacaaaaaagcaggctccgaattcaccggtgccgccaccatgattaagatcgctacgcggaagtacctggggaaacagaacgtctacgacataggtgtggagcgcgatcacaactttgctctgaaaaatggatttatcgccagcaactgcatctcccgccgtgcacagggtgtcacgttgcaagacctgcctgaaaccgaactgcccgctgttctgcagccggtcgcggaggccatggatgcgatcgctgcggccgatcttagccagacgagcgggttcggcccattcggaccgcaaggaatcggtcaatacactacatggcgtgatttcatatgcgcgattgctgatccccatgtgtatcactggcaaactgtgatggacgacaccgtcagtgcgtccgtcgcgcaggctctcgatgagctgatgctttgggccgaggactgccccgaagtccggcacctcgtgcacgcggatttcggctccaacaatgtcctgacggacaatggccgcataacagcggtcattgactggagcgaggcgatgttcggggattcccaatacgaggtcgccaacatcttcttctggaggccgtggttggcttgcctttcatacgagaccgagatcctgactgtcgagtacggattgcttcctatcggcaaaatcgtggagaagaggattgaatgtaccgtctattcagtcgataataatgggaacatctacacacagcccgtggctcaatggcacgacagaggagagcaggaagtttttgaatactgtctcgaggacggatccctcatccgcgctactaaagatcataagtttatgaccgtggacggccagatgctgccaattgacgaaatttttgaacgagagctggatctgatgagagtcgacaaccttccaaactgattaattaagaattcgacccagctttcttgtacaaagtggttggtaagcctatccctaaccctctcctcggtctcgattctacgtagtaatgagctagcagtctcgaggttaacgaattccgccccccccctaacgttactggccgaagccgcttggaataaggccggtgtgcgcttgtctatatgttattttccaccatattgccgtcttttggcaatgtgagggcccggaaacctggccctgtcttcttgacgagcattcctaggggtctttcccctctcgccaaaggaatgcaaggtctgttgaatgtcgtgaaggaagcagttcctctggaagcttcttgaagacaaacaacgtctgtagcgaccctttgcaggcagcggaaccccccacctggcgacaggtgcccctgcggccaaaagccacgtgtataagatacacctgcaaaggcggcacaaccccagtgccacgttgtgagttggatagttgtggaaagagtcaaatggctctcctcaagcgtattcaacaaggggctgaaggatgcccagaaggtaccccattgtatgggatctgatctggggcctcggtgcacatgctttacatgtgtttagtcgaggttaaaaaaacgtctaggccccccgaaccacggggacgtggttttcctttgaaaaacacgataataccatggtgagcaagggcgaggagctgttcaccggggtggtgcccatcctggtcgagctggacggcgacgtaaacggccacaagttcagcgtgtccggcgagggcgagggcgatgccacctacggcaagctgaccctgaagttcatctgcaccaccggcaagctgcccgtgccctggcccaccctcgtgaccaccctgacctacggcgtgcagtgcttcagccgctaccccgaccacatgaagcagcacgacttcttcaagtccgccatgcccgaaggctacgtccaggagcgcaccatcttcttcaaggacgacggcaactacaagacccgcgccgaggtgaagttcgagggcgacaccctggtgaaccgcatcgagctgaagggcatcgacttcaaggaggacggcaacatcctggggcacaagctggagtacaactacaacagccacaacgtctatatcatggccgacaagcagaagaacggcatcaaggtgaacttcaagatccgccacaacatcgaggacggcagcgtgcagctcgccgaccactaccagcagaacacccccatcggcgacggccccgtgctgctgcccgacaaccactacctgagcacccagtccgccctgagcaaagaccccaacgagaagcgcgatcacatggtcctgctggagttcgtgaccgccgccgggatcactctcggcatggacgagctgtacaagtaacaccggtggcgcgttaagtcgacaatcaacctctggattacaaaatttgtgaaagattgactggtattcttaactatgttgctccttttacgctatgtggatacgctgctttaatgcctttgtatcatgctattgcttcccgtatggctttcattttctcctccttgtataaatcctggttgctgtctctttatgaggagttgtggcccgttgtcaggcaacgtggcgtggtgtgcactgtgtttgctgacgcaacccccactggttggggcattgccaccacctgtcagctcctttccgggactttcgctttccccctccctattgccacggcggaactcatcgccgcctgccttgcccgctgctggacaggggctcggctgttgggcactgacaattccgtggtgttgtcggggaaatcatcgtcctttccttggctgctcgcctgtgttgccacctggattctgcgcgggacgtccttctgctacgtcccttcggccctcaatccagcggaccttccttcccgcggcctgctgccggctctgcggcctcttccgcgtcttcgccttcgccctcagacgagtcggatctccctttgggccgcctccccgcgtcgactttaagaccaatgacttacaaggcagctgtagatcttagccactttttaaaagaaaaggggggactggaagggctaattcactcccaacgaagacaagatctgctttttgcttgtactgggtctctctggttagaccagatctgagcctgggagctctctggctaactagggaacccactgcttaagcctcaataaagcttgccttgagtgcttcaagtagtgtgtgcccgtctgttgtgtgactctggtaactagagatccctcagacccttttagtcagtgtggaaaatctctagcagtacgtatagtagttcatgtcatcttattattcagtatttataacttgcaaagaaatgaatatcagagagtgagaggaacttgtttattgcagcttataatggttacaaataaagcaatagcatcacaaatttcacaaataaagcatttttttcactgcattctagttgtggtttgtccaaactcatcaatgtatcttatcatgtctggctctagctatcccgcccctaactccgcccatcccgcccctaactccgcccagttccgcccattctccgccccatggctgactaattttttttatttatgcagaggccgaggccgcctcggcctctgagctattccagaagtagtgaggaggcttttttggaggcctagggacgtacccaattcgccctatagtgagtcgtattacgcgcgctcactggccgtcgttttacaacgtcgtgactgggaaaaccctggcgttacccaacttaatcgccttgcagcacatccccctttcgccagctggcgtaatagcgaagaggcccgcaccgatcgcccttcccaacagttgcgcagcctgaatggcgaatgggacgcgccctgtagcggcgcattaagcgcggcgggtgtggtggttacgcgcagcgtgaccgctacacttgccagcgccctagcgcccgctcctttcgctttcttcccttcctttctcgccacgttcgccggctttccccgtcaagctctaaatcgggggctccctttagggttccgatttagtgctttacggcacctcgaccccaaaaaacttgattagggtgatggttcacgtagtgggccatcgccctgatagacggtttttcgccctttgacgttggagtccacgttctttaatagtggactcttgttccaaactggaacaacactcaaccctatctcggtctattcttttgatttataagggattttgccgatttcggcctattggttaaaaaatgagctgatttaacaaaaatttaacgcgaattttaacaaaatattaacgcttacaatttaggtggcacttttcggggaaatgtgcgcggaacccctatttgtttatttttctaaatacattcaaatatgtatccgctcatgagacaataaccctgataaatgcttcaataatattgaaaaaggaagagtatgagtattcaacatttccgtgtcgcccttattcccttttttgcggcattttgccttcctgtttttgctcacccagaaacgctggtgaaagtaaaagatgctgaagatcagttgggtgcacgagtgggttacatcgaactggatctcaacagcggtaagatccttgagagttttcgccccgaagaacgttttccaatgatgagcacttttaaagttctgctatgtggcgcggtattatcccgtattgacgccgggcaagagcaactcggtcgccgcatacactattctcagaatgacttggttgagtactcaccagtcacagaaaagcatcttacggatggcatgacagtaagagaattatgcagtgctgccataaccatgagtgataacactgcggccaacttacttctgacaacgatcggaggaccgaaggagctaaccgcttttttgcacaacatgggggatcatgtaactcgccttgatcgttgggaaccggagctgaatgaagccataccaaacgacgagcgtgacaccacgatgcctgtagcaatggcaacaacgttgcgcaaactattaactggcgaactacttactctagcttcccggcaacaattaatagactggatggaggcggataaagttgcaggaccacttctgcgctcggcccttccggctggctggtttattgctgataaatctggagccggtgagcgtgggtctcgcggtatcattgcagcactggggccagatggtaagccctcccgtatcgtagttatctacacgacggggagtcaggcaactatggatgaacgaaatagacagatcgctgagataggtgcctcactgattaagcattggtaactgtcagaccaagtttactcatatatactttagattgatttaaaacttcatttttaatttaaaaggatctaggtgaagatcctttttgataatctcatgaccaaaatcccttaacgtgagttttcgttccactgagcgtcagaccccgtagaaaagatcaaaggatcttcttgagatcctttttttctgcgcgtaatctgctgcttgcaaacaaaaaaaccaccgctaccagcggtggtttgtttgccggatcaagagctaccaactctttttccgaaggtaactggcttcagcagagcgcagataccaaatactgttcttctagtgtagccgtagttaggccaccacttcaagaactctgtagcaccgcctacatacctcgctctgctaatcctgttaccagtggctgctgccagtggcgataagtcgtgtcttaccgggttggactcaagacgatagttaccggataaggcgcagcggtcgggctgaacggggggttcgtgcacacagcccagcttggagcgaacgacctacaccgaactgagatacctacagcgtgagctatgagaaagcgccacgcttcccgaagggagaaaggcggacaggtatccggtaagcggcagggtcggaacaggagagcgcacgagggagcttccagggggaaacgcctggtatctttatagtcctgtcgggtttcgccacctctgacttgagcgtcgatttttgtgatgctcgtcaggggggcggagcctatggaaaaacgccagcaacgcggcctttttacggttcctggccttttgctggccttttgctcacatgttctttcctgcgttatcccctgattctgtggataaccgtattaccgcctttgagtgagctgataccgctcgccgcagccgaacgaccgagcgcagcgagtcagtgagcgaggaagcggaagagcgcccaatacgcaaaccgcctctccccgcgcgttggccgattcattaatgcagctggcacgacaggtttcccgactggaaagcgggcagtgagcgcaacgcaattaatgtgagttagctcactcattaggcaccccaggctttacactttatgcttccggctcgtatgttgtgtggaattgtgagcggataacaatttcacacaggaaacagctatgaccatgattacgccaagcgcgcaattaaccctcactaaagggaacaaaagctggagctgcaagcttaatgtagtcttatgcaatactcttgtagtcttgcaacatggtaacgatgagttagcaacatgccttacaaggagagaaaaagcaccgtgcatgccgattggtggaagtaaggtggtacgatcgtgccttattaggaaggcaacagacgggtctgacatggattggacgaaccactgaattgccgcattgcagagatattgtatttaagtgcctagctcgatacataaacgggtctctctggttagaccagatctgagcctgggagctctctggctaactagggaacccactgcttaagcctcaataaagcttgccttgagtgcttcaagtagtgtgtgcccgtctgttgtgtgactctggtaactagagatccctcagacccttttagtcagtgtggaaaatctctagcagtggcgcccgaacagggacttgaaagcgaaagggaaaccagaggagctctctcgacgcaggactcggcttgctgaagcgcgcacggcaagaggcgaggggcggcgactggtgagtacgccaaaaattttgactagcggaggctagaaggagagagatgggtgcgagagcgtcagtattaagcgggggagaattagatcgcgatgggaaaaaattcggttaaggccagggggaaagaaaaaatataaattaaaacatatagtatgggcaagcagggagctagaacgattcgcagttaatcctggcctgttagaaacatcagaaggctgtagacaaatactgggacagctacaaccatcccttcagacaggatcagaagaacttagatcattatataatacagtagcaaccctctattgtgtgcatcaaaggatagagataaaagacaccaaggaagctttagacaagatagaggaagagcaaaacaaaagtaagaccaccgcacagcaagcggccgctgatcttcagacctggaggaggagatatgagggacaattggagaagtgaattatataaatataaagtagtaaaaattgaaccattaggagtagcacccaccaaggcaaagagaagagtggtgcagagagaaaaaagagcagtgggaataggagctttgttccttgggttcttgggagcagcaggaagcactatgggcgcagcgtcaatgacgctgacggtacaggccagacaattattgtctggtatagtgcagcagcagaacaatttgctgagggctattgaggcgcaacagcatctgttgcaactcacagtctggggcatcaagcagctccaggcaagaatcctggctgtggaaagatacctaaaggatcaacagctcctggggatttggggttgctctggaaaactcatttgcaccactgctgtgccttggaatgctagttggagtaataaatctctggaacagatttggaatcacacgacctggatggagtgggacagagaaattaacaattacacaagcttaatacactccttaattgaagaatcgcaaaaccagcaagaaaagaatgaacaagaattattggaattagataaatgggcaagtttgtggaattggtttaacataacaaattggctgtggtatataaaattattcataatgatagtaggaggcttggtaggtttaagaatagtttttgctgtactttctatagtgaatagagttaggcagggatattcaccattatcgtttcagacccacctcccaaccccgaggggacccttgcgccttttccaaggcagccctgggtttgcgcagggacgcggctgctctgggcgtggttccgggaaacgcagcggcgccgaccctgggtctcgcacattcttcacgtccgttcgcagcgtcacccggatcttcgccgctacccttgtgggccccccggcgacgcttcctgctccgcccctaagtcgggaaggttccttgcggttcgcggcgtgccggacgtgacaaacggaagccgcacgtctcactagtaccctcgcagacggacagcgccagggagcaatggcagcgcgccgaccgcgatgggctgtggccaatagcggctgctcagcagggcgcgccgagagcagcggccgggaaggggcggtgcgggaggcggggtgtggggcggtagtgtgggccctgttcctgcccgcgcggtgttccgcattctgcaagcctccggagcgcacgtcggcagtcggctccctcgttgaccgaatcaccgacctctctccccagggggtacccagctgtctagagaattctagatcttgagacaaatggcagtattcatccacaattttaaaagaaaaggggggattggggggtacagtgcaggggaaagaatagtagacataatagcaacagacatacaaactaaagaattacaaaaacaaattacaaaaattcaaaattttcgggtttattacagggacagcagagatccactttggcgccggctcgaggggg

SEQ ID NO: 63 - protein, 289 aa, Artificial Sequence
  Synthetic Polypeptide
MIKIATRKYLGKQNVYDIGVERDHNFALKNGFIASNCISRRAQGVTLQDLPETELPAVLQPVAEAMDAIAAADLSQTSGFGPFGPQGIGQYTTWRDFICAIADPHVYHWQTVMDDTVSASVAQALDELMLWAEDCPEVRHLVHADFGSNNVLTDNGRITAVIDWSEAMFGDSQYEVANIFFWRPWLACLSYETEILTVEYGLLPIGKIVEKRIECTVYSVDNNGNIYTQPVAQWHDRGEQEVFEYCLEDGSLIRATKDHKFMTVDGQMLPIDEIFERELDLMRVDNLPN

SEQ ID NO: 64 - DNA, 4596 bp, Artificial Sequence
  Synthetic Polynucleotide
ctttcctgcgttatcccctgattctgtggataaccgtattaccgcctttgagtgagctgataccgctcgccgcagccgaacgaccgagcgcagcgagtcagtgagcgaggaagcggaagagcgcccaatacgcaaaccgcctctccccgcgcgttggccgattcattaatgcagctggcacgacaggtttcccgactggaaagcgggcagtgagcgcaacgcaattaatacgcgtaccgctagccaggaagagtttgtagaaacgcaaaaaggccatccgtcaggatggccttctgcttagtttgatgcctggcagtttatggcgggcgtcctgcccgccaccctccgggccgttgcttcacaacgatcaaatccgctcccggcggatttgtcctactcaggagagcgttcaccgacaaacaacagataaaacgaaaggcccagtcttccgactgagcctttcgttttatttgatgcctggcagttccctactctcgcgttaacgctagcatggatgttttcccagtcacgacgttgtaaaacgacggccagtcttaagctcgggccccaaataatgattttattttgactgatagtgacctgttcgttgcaacaaattgatgagcaatgcttttttataatgccaactttgtacaaaaaagcaggctccgaattcaccggtgagaccgtcgacctgcagactggctgtgtataagggagcctgacatttatattccccagaacatcaggttaatggcgtttttgatgtcattttcgcggtggctgagatcagccacttcttccccgataacggagaccggcacactggccatatcggtggtcatcatgcgccagctttcatccccgatatgcaccaccgggtaaagttcacgggagactttatctgacagcagacgtgcactggccagggggatcaccatccgtcgcccgggcgtgtcaataatatcactctgtacatccacaaacagacgataacggctctctcttttataggtgtaaaccttaaactgcatttcaccagcccctgttctcgtcagcaaaagagccgttcatttcaataaaccgggcgacctcagccatcccttcctgattttccgctttccagcgttcggcacgcagacgacgggcttcattctgcatggttgtgcttaccagaccggagatattgacatcatatatgccttgagcaactgatagctgtcgctgtcaactgtcactgtaatacgctgcttcatagcatacctctttttgacatacttcgggtatacatatcagtatatattcttataccgcaaaaatcagcgcgcaaatacgcatactgttatctggcttttagtaagccggatccagatctttacgccccgccctgccactcatcgcagtactgttgtaattcattaagcattctgccgacatggaagccatcacaaacggcatgatgaacctgaatcgccagcggcatcagcaccttgtcgccttgcgtataatatttgcccatggtgaaaacgggggcgaagaagttgtccatattggccacgtttaaatcaaaactggtgaaactcacccagggattggctgagacgaaaaacatattctcaataaaccctttagggaaataggccaggttttcaccgtaacacgccacatcttgcgaatatatgtgtagaaactgccggaaatcgtcgtggtattcactccagagcgatgaaaaggtttcagtttgctcatggaaaacggtgtaacaagggtgaacactatcccatatcaccagctcaccgtctttcattgccatacggaattccggatgagcattcatcaggcgggcaagaatgtgaataaaggccggataaaacttgtgcttatttttctttacggtctttaaaaaggccgtaatatccagctgaacggtctggttataggtacattgagcaactgactgaaatgcctcaaaatgttctttacgatgccattgggatatatcaacggtggtatatccagtgatttttttctccattttagcttccttagctcctgaaaatctcgacggatcctaactcaaaatccacacattatacgagccggaagcataaagtgtaaagcctggggtgcctaatgcggccgcggtctcatgcctttcatacgagaccgagatcctgactgtcgagtacggattgcttcctatcggcaaaatcgtggagaagaggattgaatgtaccgtctattcagtcgataataatgggaacatctacacacagcccgtggctcaatggcacgacagaggagagcaggaagtttttgaatactgtctcgaggacggatccctcatccgcgctactaaagatcataagtttatgaccgtggacggccagatgctgccaattgacgaaatttttgaacgagagctggatctgatgagagtcgacaaccttccaaactgattaattaagaattcgacccagctttcttgtacaaagttggcattataaaaaataattgctcatcaatttgttgcaacgaacaggtcactatcagtcaaaataaaatcattatttgccatccagctgatatcccctatagtgagtcgtattacatggtcatagctgtttcctggcagctctggcccgtgtctcaaaatctctgatgttacattgcacaagataaaaatatatcatcatgcctcctctagaccagccaggacagaaatgcctcgacttcgctgctgcccaaggttgccgggtgacgcacaccgtggaaacggatgaaggcacgaacccagtggacataagcctgttcggttcgtaagctgtaatgcaagtagcgtatgcgctcacgcaactggtccagaaccttgaccgaacgcagcggtggtaacggcgcagtggcggttttcatggcttgttatgactgtttttttggggtacagtctatgcctcgggcatccaagcagcaagcgcgttacgccgtgggtcgatgtttgatgttatggagcagcaacgatgttacgcagcagggcagtcgccctaaaacaaagttaaacatcatgagggaagcggtgatcgccgaagtatcgactcaactatcagaggtagttggcgtcatcgagcgccatctcgaaccgacgttgctggccgtacatttgtacggctccgcagtggatggcggcctgaagccacacagtgatattgatttgctggttacggtgaccgtaaggcttgatgaaacaacgcggcgagctttgatcaacgaccttttggaaacttcggcttcccctggagagagcgagattctccgcgctgtagaagtcaccattgttgtgcacgacgacatcattccgtggcgttatccagctaagcgcgaactgcaatttggagaatggcagcgcaatgacattcttgcaggtatcttcgagccagccacgatcgacattgatctggctatcttgctgacaaaagcaagagaacatagcgttgccttggtaggtccagcggcggaggaactctttgatccggttcctgaacaggatctatttgaggcgctaaatgaaaccttaacgctatggaactcgccgcccgactgggctggcgatgagcgaaatgtagtgcttacgttgtcccgcatttggtacagcgcagtaaccggcaaaatcgcgccgaaggatgtcgctgccgactgggcaatggagcgcctgccggcccagtatcagcccgtcatacttgaagctagacaggcttatcttggacaagaagaagatcgcttggcctcgcgcgcagatcagttggaagaatttgtccactacgtgaaaggcgagatcaccaaggtagtcggcaaataaccctcgagccacccatgaccaaaatcccttaacgtgagttacgcgtcgttccactgagcgtcagaccccgtagaaaagatcaaaggatcttcttgagatcctttttttctgcgcgtaatctgctgcttgcaaacaaaaaaaccaccgctaccagcggtggtttgtttgccggatcaagagctaccaactctttttccgaaggtaactggcttcagcagagcgcagataccaaatactgtccttctagtgtagccgtagttaggccaccacttcaagaactctgtagcaccgcctacatacctcgctctgctaatcctgttaccagtggctgctgccagtggcgataagtcgtgtcttaccgggttggactcaagacgatagttaccggataaggcgcagcggtcgggctgaacggggggttcgtgcacacagcccagcttggagcgaacgacctacaccgaactgagatacctacagcgtgagcattgagaaagcgccacgcttcccgaagggagaaaggcggacaggtatccggtaagcggcagggtcggaacaggagagcgcacgagggagcttccagggggaaacgcctggtatctttatagtcctgtcgggtttcgccacctctgacttgagcgtcgatttttgtgatgctcgtcaggggggcggagcctatggaaaaacgccagcaacgcggcctttttacggttcctggccttttgctggccttttgctcacatgtt

SEQ ID NO: 65 - DNA, 4405 bp, Artificial Sequence
  Synthetic Polynucleotide
ctttcctgcgttatcccctgattctgtggataaccgtattaccgcctttgagtgagctgataccgctcgccgcagccgaacgaccgagcgcagcgagtcagtgagcgaggaagcggaagagcgcccaatacgcaaaccgcctctccccgcgcgttggccgattcattaatgcagctggcacgacaggtttcccgactggaaagcgggcagtgagcgcaacgcaattaatacgcgtaccgctagccaggaagagtttgtagaaacgcaaaaaggccatccgtcaggatggccttctgcttagtttgatgcctggcagtttatggcgggcgtcctgcccgccaccctccgggccgttgcttcacaacgatcaaatccgctcccggcggatttgtcctactcaggagagcgttcaccgacaaacaacagataaaacgaaaggcccagtcttccgactgagcctttcgttttatttgatgcctggcagttccctactctcgcgttaacgctagcatggatgttttcccagtcacgacgttgtaaaacgacggccagtcttaagctcgggccccaaataatgattttattttgactgatagtgacctgttcgttgcaacaaattgatgagcaatgcttttttataatgccaactttgtacaaaaaagcaggctccgaattcaccggtgccgccaccatgattaagatcgctacgcggaagtacctggggaaacagaacgtctacgacataggtgtggagcgcgatcacaactttgctctgaaaaatggatttatcgccagcaactgagaccgtcgacctgcagactggctgtgtataagggagcctgacatttatattccccagaacatcaggttaatggcgtttttgatgtcattttcgcggtggctgagatcagccacttcttccccgataacggagaccggcacactggccatatcggtggtcatcatgcgccagctttcatccccgatatgcaccaccgggtaaagttcacgggagactttatctgacagcagacgtgcactggccagggggatcaccatccgtcgcccgggcgtgtcaataatatcactctgtacatccacaaacagacgataacggctctctcttttataggtgtaaaccttaaactgcatttcaccagcccctgttctcgtcagcaaaagagccgttcatttcaataaaccgggcgacctcagccatcccttcctgattttccgctttccagcgttcggcacgcagacgacgggcttcattctgcatggttgtgcttaccagaccggagatattgacatcatatatgccttgagcaactgatagctgtcgctgtcaactgtcactgtaatacgctgcttcatagcatacctctttttgacatacttcgggtatacatatcagtatatattcttataccgcaaaaatcagcgcgcaaatacgcatactgttatctggcttttagtaagccggatccagatctttacgccccgccctgccactcatcgcagtactgttgtaattcattaagcattctgccgacatggaagccatcacaaacggcatgatgaacctgaatcgccagcggcatcagcaccttgtcgccttgcgtataatatttgcccatggtgaaaacgggggcgaagaagttgtccatattggccacgtttaaatcaaaactggtgaaactcacccagggattggctgagacgaaaaacatattctcaataaaccctttagggaaataggccaggttttcaccgtaacacgccacatcttgcgaatatatgtgtagaaactgccggaaatcgtcgtggtattcactccagagcgatgaaaaggtttcagtttgctcatggaaaacggtgtaacaagggtgaacactatcccatatcaccagctcaccgtctttcattgccatacggaattccggatgagcattcatcaggcgggcaagaatgtgaataaaggccggataaaacttgtgcttatttttctttacggtctttaaaaaggccgtaatatccagctgaacggtctggttataggtacattgagcaactgactgaaatgcctcaaaatgttctttacgatgccattgggatatatcaacggtggtatatccagtgatttttttctccattttagcttccttagctcctgaaaatctcgacggatcctaactcaaaatccacacattatacgagccggaagcataaagtgtaaagcctggggtgcctaatgcggccgcggtctcattaattaagaattcgacccagctttcttgtacaaagttggcattataaaaaataattgctcatcaatttgttgcaacgaacaggtcactatcagtcaaaataaaatcattatttgccatccagctgatatcccctatagtgagtcgtattacatggtcatagctgtttcctggcagctctggcccgtgtctcaaaatctctgatgttacattgcacaagataaaaatatatcatcatgcctcctctagaccagccaggacagaaatgcctcgacttcgctgctgcccaaggttgccgggtgacgcacaccgtggaaacggatgaaggcacgaacccagtggacataagcctgttcggttcgtaagctgtaatgcaagtagcgtatgcgctcacgcaactggtccagaaccttgaccgaacgcagcggtggtaacggcgcagtggcggttttcatggcttgttatgactgtttttttggggtacagtctatgcctcgggcatccaagcagcaagcgcgttacgccgtgggtcgatgtttgatgttatggagcagcaacgatgttacgcagcagggcagtcgccctaaaacaaagttaaacatcatgagggaagcggtgatcgccgaagtatcgactcaactatcagaggtagttggcgtcatcgagcgccatctcgaaccgacgttgctggccgtacatttgtacggctccgcagtggatggcggcctgaagccacacagtgatattgatttgctggttacggtgaccgtaaggcttgatgaaacaacgcggcgagctttgatcaacgaccttttggaaacttcggcttcccctggagagagcgagattctccgcgctgtagaagtcaccattgttgtgcacgacgacatcattccgtggcgttatccagctaagcgcgaactgcaatttggagaatggcagcgcaatgacattcttgcaggtatcttcgagccagccacgatcgacattgatctggctatcttgctgacaaaagcaagagaacatagcgttgccttggtaggtccagcggcggaggaactctttgatccggttcctgaacaggatctatttgaggcgctaaatgaaaccttaacgctatggaactcgccgcccgactgggctggcgatgagcgaaatgtagtgcttacgttgtcccgcatttggtacagcgcagtaaccggcaaaatcgcgccgaaggatgtcgctgccgactgggcaatggagcgcctgccggcccagtatcagcccgtcatacttgaagctagacaggcttatcttggacaagaagaagatcgcttggcctcgcgcgcagatcagttggaagaatttgtccactacgtgaaaggcgagatcaccaaggtagtcggcaaataaccctcgagccacccatgaccaaaatcccttaacgtgagttacgcgtcgttccactgagcgtcagaccccgtagaaaagatcaaaggatcttcttgagatcctttttttctgcgcgtaatctgctgcttgcaaacaaaaaaaccaccgctaccagcggtggtttgtttgccggatcaagagctaccaactctttttccgaaggtaactggcttcagcagagcgcagataccaaatactgtccttctagtgtagccgtagttaggccaccacttcaagaactctgtagcaccgcctacatacctcgctctgctaatcctgttaccagtggctgctgccagtggcgataagtcgtgtcttaccgggttggactcaagacgatagttaccggataaggcgcagcggtcgggctgaacggggggttcgtgcacacagcccagcttggagcgaacgacctacaccgaactgagatacctacagcgtgagcattgagaaagcgccacgcttcccgaagggagaaaggcggacaggtatccggtaagcggcagggtcggaacaggagagcgcacgagggagcttccagggggaaacgcctggtatctttatagtcctgtcgggtttcgccacctctgacttgagcgtcgatttttgtgatgctcgtcaggggggcggagcctatggaaaaacgccagcaacgcggcctttttacggttcctggccttttgctggccttttgctcacatgtt

SEQ ID NO: 66 - DNA, 4659 bp, Artificial Sequence
  Synthetic Polynucleotide
ctttcctgcgttatcccctgattctgtggataaccgtattaccgcctttgagtgagctgataccgctcgccgcagccgaacgaccgagcgcagcgagtcagtgagcgaggaagcggaagagcgcccaatacgcaaaccgcctctccccgcgcgttggccgattcattaatgcagctggcacgacaggtttcccgactggaaagcgggcagtgagcgcaacgcaattaatacgcgtaccgctagccaggaagagtttgtagaaacgcaaaaaggccatccgtcaggatggccttctgcttagtttgatgcctggcagtttatggcgggcgtcctgcccgccaccctccgggccgttgcttcacaacgatcaaatccgctcccggcggatttgtcctactcaggagagcgttcaccgacaaacaacagataaaacgaaaggcccagtcttccgactgagcctttcgttttatttgatgcctggcagttccctactctcgcgttaacgctagcatggatgttttcccagtcacgacgttgtaaaacgacggccagtcttaagctcgggccccaaataatgattttattttgactgatagtgacctgttcgttgcaacaaattgatgagcaatgcttttttataatgccaactttgtacaaaaaagcaggctccgaattcaccggtgagaccgtcgacctgcagactggctgtgtataagggagcctgacatttatattccccagaacatcaggttaatggcgtttttgatgtcattttcgcggtggctgagatcagccacttcttccccgataacggagaccggcacactggccatatcggtggtcatcatgcgccagctttcatccccgatatgcaccaccgggtaaagttcacgggagactttatctgacagcagacgtgcactggccagggggatcaccatccgtcgcccgggcgtgtcaataatatcactctgtacatccacaaacagacgataacggctctctcttttataggtgtaaaccttaaactgcatttcaccagcccctgttctcgtcagcaaaagagccgttcatttcaataaaccgggcgacctcagccatcccttcctgattttccgctttccagcgttcggcacgcagacgacgggcttcattctgcatggttgtgcttaccagaccggagatattgacatcatatatgccttgagcaactgatagctgtcgctgtcaactgtcactgtaatacgctgcttcatagcatacctctttttgacatacttcgggtatacatatcagtatatattcttataccgcaaaaatcagcgcgcaaatacgcatactgttatctggcttttagtaagccggatccagatctttacgccccgccctgccactcatcgcagtactgttgtaattcattaagcattctgccgacatggaagccatcacaaacggcatgatgaacctgaatcgccagcggcatcagcaccttgtcgccttgcgtataatatttgcccatggtgaaaacgggggcgaagaagttgtccatattggccacgtttaaatcaaaactggtgaaactcacccagggattggctgagacgaaaaacatattctcaataaaccctttagggaaataggccaggttttcaccgtaacacgccacatcttgcgaatatatgtgtagaaactgccggaaatcgtcgtggtattcactccagagcgatgaaaaggtttcagtttgctcatggaaaacggtgtaacaagggtgaacactatcccatatcaccagctcaccgtctttcattgccatacggaattccggatgagcattcatcaggcgggcaagaatgtgaataaaggccggataaaacttgtgcttatttttctttacggtctttaaaaaggccgtaatatccagctgaacggtctggttataggtacattgagcaactgactgaaatgcctcaaaatgttctttacgatgccattgggatatatcaacggtggtatatccagtgatttttttctccattttagcttccttagctcctgaaaatctcgacggatcctaactcaaaatccacacattatacgagccggaagcataaagtgtaaagcctggggtgcctaatgcggccgcggtctcatgccttagcttcggtaccgagatactcaccgttgagtacggaccactgccaattggcaagatcgttagcgaagagattaattgttccgtctactctgttgatcctgagggcagggtatacacacaggctattgctcagtggcatgacagaggcgagcaggaggttcttgagtacgagctggaggatgggtcagttatccgggcgacatcagatcaccgattcctgactacagattatcagctgctcgccattgaagaaatcttcgcaagacagttggatctcctgactctggaaaatatcaagcagaccgaggaagctctggacaaccaccgcctgccttttccgctgcttgatgccggcaccattaagtgattaattaagaattcgacccagctttcttgtacaaagttggcattataaaaaataattgctcatcaatttgttgcaacgaacaggtcactatcagtcaaaataaaatcattatttgccatccagctgatatcccctatagtgagtcgtattacatggtcatagctgtttcctggcagctctggcccgtgtctcaaaatctctgatgttacattgcacaagataaaaatatatcatcatgcctcctctagaccagccaggacagaaatgcctcgacttcgctgctgcccaaggttgccgggtgacgcacaccgtggaaacggatgaaggcacgaacccagtggacataagcctgttcggttcgtaagctgtaatgcaagtagcgtatgcgctcacgcaactggtccagaaccttgaccgaacgcagcggtggtaacggcgcagtggcggttttcatggcttgttatgactgtttttttggggtacagtctatgcctcgggcatccaagcagcaagcgcgttacgccgtgggtcgatgtttgatgttatggagcagcaacgatgttacgcagcagggcagtcgccctaaaacaaagttaaacatcatgagggaagcggtgatcgccgaagtatcgactcaactatcagaggtagttggcgtcatcgagcgccatctcgaaccgacgttgctggccgtacatttgtacggctccgcagtggatggcggcctgaagccacacagtgatattgatttgctggttacggtgaccgtaaggcttgatgaaacaacgcggcgagctttgatcaacgaccttttggaaacttcggcttcccctggagagagcgagattctccgcgctgtagaagtcaccattgttgtgcacgacgacatcattccgtggcgttatccagctaagcgcgaactgcaatttggagaatggcagcgcaatgacattcttgcaggtatcttcgagccagccacgatcgacattgatctggctatcttgctgacaaaagcaagagaacatagcgttgccttggtaggtccagcggcggaggaactctttgatccggttcctgaacaggatctatttgaggcgctaaatgaaaccttaacgctatggaactcgccgcccgactgggctggcgatgagcgaaatgtagtgcttacgttgtcccgcatttggtacagcgcagtaaccggcaaaatcgcgccgaaggatgtcgctgccgactgggcaatggagcgcctgccggcccagtatcagcccgtcatacttgaagctagacaggcttatcttggacaagaagaagatcgcttggcctcgcgcgcagatcagttggaagaatttgtccactacgtgaaaggcgagatcaccaaggtagtcggcaaataaccctcgagccacccatgaccaaaatcccttaacgtgagttacgcgtcgttccactgagcgtcagaccccgtagaaaagatcaaaggatcttcttgagatcctttttttctgcgcgtaatctgctgcttgcaaacaaaaaaaccaccgctaccagcggtggtttgtttgccggatcaagagctaccaactctttttccgaaggtaactggcttcagcagagcgcagataccaaatactgtccttctagtgtagccgtagttaggccaccacttcaagaactctgtagcaccgcctacatacctcgctctgctaatcctgttaccagtggctgctgccagtggcgataagtcgtgtcttaccgggttggactcaagacgatagttaccggataaggcgcagcggtcgggctgaacggggggttcgtgcacacagcccagcttggagcgaacgacctacaccgaactgagatacctacagcgtgagcattgagaaagcgccacgcttcccgaagggagaaaggcggacaggtatccggtaagcggcagggtcggaacaggagagcgcacgagggagcttccagggggaaacgcctggtatctttatagtcctgtcgggtttcgccacctctgacttgagcgtcgatttttgtgatgctcgtcaggggggcggagcctatggaaaaacgccagcaacgcggcctttttacggttcctggccttttgctggccttttgctcacatgtt

SEQ ID NO: 67 - DNA, 4405 bp, Artificial Sequence
  Synthetic Polynucleotide
ctttcctgcgttatcccctgattctgtggataaccgtattaccgcctttgagtgagctgataccgctcgccgcagccgaacgaccgagcgcagcgagtcagtgagcgaggaagcggaagagcgcccaatacgcaaaccgcctctccccgcgcgttggccgattcattaatgcagctggcacgacaggtttcccgactggaaagcgggcagtgagcgcaacgcaattaatacgcgtaccgctagccaggaagagtttgtagaaacgcaaaaaggccatccgtcaggatggccttctgcttagtttgatgcctggcagtttatggcgggcgtcctgcccgccaccctccgggccgttgcttcacaacgatcaaatccgctcccggcggatttgtcctactcaggagagcgttcaccgacaaacaacagataaaacgaaaggcccagtcttccgactgagcctttcgttttatttgatgcctggcagttccctactctcgcgttaacgctagcatggatgttttcccagtcacgacgttgtaaaacgacggccagtcttaagctcgggccccaaataatgattttattttgactgatagtgacctgttcgttgcaacaaattgatgagcaatgcttttttataatgccaactttgtacaaaaaagcaggctccgaattcaccggtgccgccaccatggtgaaagtgattggccggcgatcactcggcgtccagaggattttcgatatcggcctcccgcaggaccacaattttctgctcgctaatggtgctattgcagctaactgagaccgtcgacctgcagactggctgtgtataagggagcctgacatttatattccccagaacatcaggttaatggcgtttttgatgtcattttcgcggtggctgagatcagccacttcttccccgataacggagaccggcacactggccatatcggtggtcatcatgcgccagctttcatccccgatatgcaccaccgggtaaagttcacgggagactttatctgacagcagacgtgcactggccagggggatcaccatccgtcgcccgggcgtgtcaataatatcactctgtacatccacaaacagacgataacggctctctcttttataggtgtaaaccttaaactgcatttcaccagcccctgttctcgtcagcaaaagagccgttcatttcaataaaccgggcgacctcagccatcccttcctgattttccgctttccagcgttcggcacgcagacgacgggcttcattctgcatggttgtgcttaccagaccggagatattgacatcatatatgccttgagcaactgatagctgtcgctgtcaactgtcactgtaatacgctgcttcatagcatacctctttttgacatacttcgggtatacatatcagtatatattcttataccgcaaaaatcagcgcgcaaatacgcatactgttatctggcttttagtaagccggatccagatctttacgccccgccctgccactcatcgcagtactgttgtaattcattaagcattctgccgacatggaagccatcacaaacggcatgatgaacctgaatcgccagcggcatcagcaccttgtcgccttgcgtataatatttgcccatggtgaaaacgggggcgaagaagttgtccatattggccacgtttaaatcaaaactggtgaaactcacccagggattggctgagacgaaaaacatattctcaataaaccctttagggaaataggccaggttttcaccgtaacacgccacatcttgcgaatatatgtgtagaaactgccggaaatcgtcgtggtattcactccagagcgatgaaaacgtttcagtttgctcatggaaaacggtgtaacaagggtgaacactatcccatatcaccagctcaccgtctttcattgccatacggaattccggatgagcattcatcaggcgggcaagaatgtgaataaaggccggataaaacttgtgcttatttttctttacggtctttaaaaaggccgtaatatccagctgaacggtctggttataggtacattgagcaactgactgaaatgcctcaaaatgttctttacgatgccattgggatatatcaacggtggtatatccagtgatttttttctccattttagcttccttagctcctgaaaatctcgacggatcctaactcaaaatccacacattatacgagccggaagcataaagtgtaaagcctggggtgcctaatgcggccgcggtctcattaattaagaattcgacccagctttcttgtacaaagttggcattataaaaaataattgctcatcaatttgttgcaacgaacaggtcactatcagtcaaaataaaatcattatttgccatccagctgatatcccctatagtgagtcgtattacatggtcatagctgtttcctggcagctctggcccgtgtctcaaaatctctgatgttacattgcacaagataaaaatatatcatcatgcctcctctagaccagccaggacagaaatgcctcgacttcgctgctgcccaaggttgccgggtgacgcacaccgtggaaacggatgaaggcacgaacccagtggacataagcctgttcggttcgtaagctgtaatgcaagtagcgtatgcgctcacgcaactggtccagaaccttgaccgaacgcagcggtggtaacggcgcagtggcggttttcatggcttgttatgactgtttttttggggtacagtctatgcctcgggcatccaagcagcaagcgcgttacgccgtgggtcgatgtttgatgttatggagcagcaacgatgttacgcagcagggcagtcgccctaaaacaaagttaaacatcatgagggaagcggtgatcgccgaagtatcgactcaactatcagaggtagttggcgtcatcgagcgccatctcgaaccgacgttgctggccgtacatttgtacggctccgcagtggatggcggcctgaagccacacagtgatattgatttgctggttacggtgaccgtaaggcttgatgaaacaacgcggcgagctttgatcaacgaccttttggaaacttcggcttcccctggagagagcgagattctccgcgctgtagaagtcaccattgttgtgcacgacgacatcattccgtggcgttatccagctaagcgcgaactgcaatttggagaatggcagcgcaatgacattcttgcaggtatcttcgagccagccacgatcgacattgatctggctatcttgctgacaaaagcaagagaacatagcgttgccttggtaggtccagcggcggaggaactctttgatccggttcctgaacaggatctatttgaggcgctaaatgaaaccttaacgctatggaactcgccgcccgactgggctggcgatgagcgaaatgtagtgcttacgttgtcccgcatttggtacagcgcagtaaccggcaaaatcgcgccgaaggatgtcgctgccgactgggcaatggagcgcctgccggcccagtatcagcccgtcatacttgaagctagacaggcttatcttggacaagaagaagatcgcttggcctcgcgcgcagatcagttggaagaatttgtccactacgtgaaaggcgagatcaccaaggtagtcggcaaataaccctcgagccacccatgaccaaaatcccttaacgtgagttacgcgtcgttccactgagcgtcagaccccgtagaaaagatcaaaggatcttcttgagatcctttttttctgcgcgtaatctgctgcttgcaaacaaaaaaaccaccgctaccagcggtggtttgtttgccggatcaagagctaccaactctttttccgaaggtaactggcttcagcagagcgcagataccaaatactgtccttctagtgtagccgtagttaggccaccacttcaagaactctgtagcaccgcctacatacctcgctctgctaatcctgttaccagtggctgctgccagtggcgataagtcgtgtcttaccgggttggactcaagacgatagttaccggataaggcgcagcggtcgggctgaacggggggttcgtgcacacagcccagcttggagcgaacgacctacaccgaactgagatacctacagcgtgagcattgagaaagcgccacgcttcccgaagggagaaaggcggacaggtatccggtaagcggcagggtcggaacaggagagcgcacgagggagcttccagggggaaacgcctggtatctttatagtcctgtcgggtttcgccacctctgacttgagcgtcgatttttgtgatgctcgtcaggggggcggagcctatggaaaaacgccagcaacgcggcctttttacggttcctggccttttgctggccttttgctcacatgtt

SEQ ID NO: 68 - DNA, 4607 bp, Artificial Sequence
  Synthetic Polynucleotide
ctttcctgcgttatcccctgattctgtggataaccgtattaccgcctttgagtgagctgataccgctcgccgcagccgaacgaccgagcgcagcgagtcagtgagcgaggaagcggaagagcgcccaatacgcaaaccgcctctccccgcgcgttggccgattcattaatgcagctggcacgacaggtttcccgactggaaagcgggcagtgagcgcaacgcaattaatacgcgtaccgctagccaggaagagtttgtagaaacgcaaaaaggccatccgtcaggatggccttctgcttagtttgatgcctggcagtttatggcgggcgtcctgcccgccaccctccgggccgttgcttcacaacgatcaaatccgctcccggcggatttgtcctactcaggagagcgttcaccgacaaacaacagataaaacgaaaggcccagtcttccgactgagcctttcgttttatttgatgcctggcagttccctactctcgcgttaacgctagcatggatgttttcccagtcacgacgttgtaaaacgacggccagtcttaagctcgggccccaaataatgattttattttgactgatagtgacctgttcgttgcaacaaattgatgagcaatgcttttttataatgccaactttgtacaaaaaagcaggctccgaattcaccggtgagacctcgacctgcagactggctgtgtataagggagcctgacatttatattccccagaacatcaggttaatggcgtttttgatgtcattttcgcggtggctgagatcagccacttcttccccgataacggagaccggcacactggccatatcggtggtcatcatgcgccagctttcatccccgatatgcaccaccgggtaaagttcacgggagactttatctgacagcagacgtgcactggccagggggatcaccatccgtcgcccgggcgtgtcaataatatcactctgtacatccacaaacagacgataacggctctctcttttataggtgtaaaccttaaactgcatttcaccagcccctgttctcgtcagcaaaagagccgttcatttcaataaaccgggcgacctcagccatcccttcctgattttccgctttccagcgttcggcacgcagacgacgggcttcattctgcatggttgtgcttaccagaccggagatattgacatcatatatgccttgagcaactgatagctgtcgctgtcaactgtcactgtaatacgctgcttcatagcatacctctttttgacatacttcgggtatacatatcagtatatattcttataccgcaaaaatcagcgcgcaaatacgcatactgttatctggcttttagtaagccggatccagatctttacgccccgccctgccactcatcgcagtactgttgtaattcattaagcattctgccgacatggaagccatcacaaacggcatgatgaacctgaatcgccagcggcatcagcaccttgtcgccttgcgtataatatttgcccatggtgaaaacgggggcgaagaagttgtccatattggccacgtttaaatcaaaactggtgaaactcacccagggattggctgagacgaaaaacatattctcaataaaccctttagggaaataggccaggttttcaccgtaacacgccacatcttgcgaatatatgtgtagaaactgccggaaatcgtcgtggtattcactccagagcgatgaaaaggtttcagtttgctcatggaaaacggtgtaacaagggtgaacactatcccatatcaccagctcaccgtctttcattgccatacggaattccggatgagcattcatcaggcgggcaagaatgtgaataaaggccggataaaacttgtgcttatttttctttacggtctttaaaaaggccgtaatatccagctgaacggtctggttataggtacattgagcaactgactgaaatgcctcaaaatgttctttacgatgccattgggatatatcaacggtggtatatccagtgatttttttctccattttagcttccttagctcctgaaaatctcgacggatcctaactcaaaatccacacattatacgagccggaagcataaagtgtaaagcctggggtgcctaatgcggccgcggtctcatgtatcagtggcgactccctgatctcactcgcaagcactggaaagcgagttagcatcaaggacttgctggacgaaaaggatttcgaaatttgggcaatcaatgagcagaccatgaaactggagtctgcaaaggtgtcccgggtgttttgcacgggtaagaagcttgtttatatccttaaaactagactgggccggacgatcaaagccaccgcgaaccacagattcttgacaatcgacgggtggaaacggctggacgaactgagcttgaaggagcacatcgcccttcctcggaagctcgagtcatcttccctgcagctgtgattaattaagaattcgacccagctttcttgtacaaagttggcattataaaaaataattgctcatcaatttgttgcaacgaacaggtcactatcagtcaaaataaaatcattatttgccatccagctgatatcccctatagtgagtcgtattacatggtcatagctgtttcctggcagctctggcccgtgtctcaaaatctctgatgttacattgcacaagataaaaatatatcatcatgcctcctctagaccagccaggacagaaatgcctcgacttcgctgctgcccaaggttgccgggtgacgcacaccgtggaaacggatgaaggcacgaacccagtggacataagcctgttcggttcgtaagctgtaatgcaagtagcgtatgcgctcacgcaactggtccagaaccttgaccgaacgcagcggtggtaacggcgcagtggcggttttcatggcttgttatgactgtttttttggggtacagtctatgcctcgggcatccaagcagcaagcgcgttacgccgtgggtcgatgtttgatgttatggagcagcaacgatgttacgcagcagggcagtcgccctaaaacaaagttaaacatcatgagggaagcggtgatcgccgaagtatcgactcaactatcagaggtagttggcgtcatcgagcgccatctcgaaccgacgttgctggccgtacatttgtacggctccgcagtggatggcggcctgaagccacacagtgatattgatttgctggttacggtgaccgtaaggcttgatgaaacaacgcggcgagctttgatcaacgaccttttggaaacttcggcttcccctggagagagcgagattctccgcgctgtagaagtcaccattgttgtgcacgacgacatcattccgtggcgttatccagctaagcgcgaactgcaatttggagaatggcagcgcaatgacattcttgcaggtatcttcgagccagccacgatcgacattgatctggctatcttgctgacaaaagcaagagaacatagcgttgccttggtaggtccagcggcggaggaactctttgatccggttcctgaacaggatctatttgaggcgctaaatgaaaccttaacgctatggaactcgccgcccgactgggctggcgatgagcgaaatgtagtgcttacgttgtcccgcatttggtacagcgcagtaaccggcaaaatcgcgccgaaggatgtcgctgccgactgggcaatggagcgcctgccggcccagtatcagcccgtcatacttgaagctagacaggcttatcttggacaagaagaagatcgcttggcctcgcgcgcagatcagttggaagaatttgtccactacgtgaaaggcgagatcaccaaggtagtcggcaaataaccctcgagccacccatgaccaaaatcccttaacgtgagttacgcgtcgttccactgagcgtcagaccccgtagaaaagatcaaaggatcttcttgagatcctttttttctgcgcgtaatctgctgcttgcaaacaaaaaaaccaccgctaccagcggtggtttgtttgccggatcaagagctaccaactctttttccgaaggtaactggcttcagcagagcgcagataccaaatactgtccttctagtgtagccgtagttaggccaccacttcaagaactctgtagcaccgcctacatacctcgctctgctaatcctgttaccagtggctgctgccagtggcgataagtcgtgtcttaccgggttggactcaagacgatagttaccggataaggcgcagcggtcgggctgaacggggggttcgtgcacacagcccagcttggagcgaacgacctacaccgaactgagatacctacagcgtgagcattgagaaagcgccacgcttcccgaagggagaaaggcggacaggtatccggtaagcggcagggtcggaacaggagagcgcacgagggagcttccagggggaaacgcctggtatctttatagtcctgtcgggtttcgccacctctgacttgagcgtcgatttttgtgatgctcgtcaggggggcggagcctatggaaaaacgccagcaacgcggcctttttacggttcctggccttttgctggccttttgctcacatgtt

SEQ ID NO: 69 - DNA, 4444 bp, Artificial Sequence
  Synthetic Polynucleotide
ctttcctgcgttatcccctgattctgtggataaccgtattaccgcctttgagtgagctgataccgctcgccgcagccgaacgaccgagcgcagcgagtcagtgagcgaggaagcggaagagcgcccaatacgcaaaccgcctctccccgcgcgttggccgattcattaatgcagctggcacgacaggtttcccgactggaaagcgggcagtgagcgcaacgcaattaatacgcgtaccgctagccaggaagagtttgtagaaacgcaaaaaggccatccgtcaggatggccttctgcttagtttgatgcctggcagtttatggcgggcgtcctgcccgccaccctccgggccgttgcttcacaacgatcaaatccgctcccggcggatttgtcctactcaggagagcgttcaccgacaaacaacagataaaacgaaaggcccagtcttccgactgagcctttcgttttatttgatgcctggcagttccctactctcgcgttaacgctagcatggatgttttcccagtcacgacgttgtaaaacgacggccagtcttaagctcgggccccaaataatgattttattttgactgatagtgacctgttcgttgcaacaaattgatgagcaatgcttttttataatgccaactttgtacaaaaaagcaggctccgaattcaccggtgccgccaccatgagtcccgaaatcgaaaagctctctcagagcgatatatattgggactccatcgtaagcataacagagacgggggtcgaggaggtgttcgatctgacagttcctgggcctcataatttcgtagcgaacgacatcattgtacataactgagaccgtcgacctgcagactggctgtgtataagggagcctgacatttatattccccagaacatcaggttaatggcgtttttgatgtcattttcgcggtggctgagatcagccacttcttccccgataacggagaccggcacactggccatatcggtggtcatcatgcgccagctttcatccccgatatgcaccaccgggtaaagttcacgggagactttatctgacagcagacgtgcactggccagggggatcaccatccgtcgcccgggcgtgtcaataatatcactctgtacatccacaaacagacgataacggctctctcttttataggtgtaaaccttaaactgcatttcaccagcccctgttctcgtcagcaaaagagccgttcatttcaataaaccgggcgacctcagccatcccttcctgattttccgctttccagcgttcggcacgcagacgacgggcttcattctgcatggttgtgcttaccagaccggagatattgacatcatatatgccttgagcaactgatagctgtcgctgtcaactgtcactgtaatacgctgcttcatagcatacctctttttgacatacttcgggtatacatatcagtatatattcttataccgcaaaaatcagcgcgcaaatacgcatactgttatctggcttttagtaagccggatccagatctttacgccccgccctgccactcatcgcagtactgttgtaattcattaagcattctgccgacatggaagccatcacaaacggcatgatgaacctgaatcgccagcggcatcagcaccttgtcgccttgcgtataatatttgcccatggtgaaaacgggggcgaagaagttgtccatattggccacgtttaaatcaaaactggtgaaactcacccagggattggctgagacgaaaaacatattctcaataaaccctttagggaaataggccaggttttcaccgtaacacgccacatcttgcgaatatatgtgtagaaactgccggaaatcgtcgtggtattcactccagagcgatgaaaaggtttcagtttgctcatggaaaacggtgtaacaagggtgaacactatcccatatcaccagctcaccgtctttcattgccatacggaattccggatgagcattcatcaggcgggcaagaatgtgaataaaggccggataaaacttgtgcttatttttctttacggtctttaaaaaggccgtaatatccagctgaacggtctggttataggtacattgagcaactgactgaaatgcctcaaaatgttctttacgatgccattgggatatatcaacggtggtatatccagtgatttttttctccattttagcttccttagctcctgaaaatctcgacggatcctaactcaaaatccacacattatacgagccggaagcataaagtgtaaagcctggggtgcctaatgcggccgcggtctcattaattaagaattcgacccagctttcttgtacaaagttggcattataaaaaataattgctcatcaatttgttgcaacgaacaggtcactatcagtcaaaataaaatcattatttgccatccagctgatatcccctatagtgagtcgtattacatggtcatagctgtttcctggcagctctggcccgtgtctcaaaatctctgatgttacattgcacaagataaaaatatatcatcatgcctcctctagaccagccaggacagaaatgcctcgacttcgctgctgcccaaggttgccgggtgacgcacaccgtggaaacggatgaaggcacgaacccagtggacataagcctgttcggttcgtaagctgtaatgcaagtagcgtatgcgctcacgcaactggtccagaaccttgaccgaacgcagcggtggtaacggcgcagtggcggttttcatggcttgttatgactgtttttttggggtacagtctatgcctcgggcatccaagcagcaagcgcgttacgccgtgggtcgatgtttgatgttatggagcagcaacgatgttacgcagcagggcagtcgccctaaaacaaagttaaacatcatgagggaagcggtgatcgccgaagtatcgactcaactatcagaggtagttggcgtcatcgagcgccatctcgaaccgacgttgctggccgtacatttgtacggctccgcagtggatggcggcctgaagccacacagtgatattgatttgctggttacggtgaccgtaaggcttgatgaaacaacgcggcgagctttgatcaacgaccttttggaaacttcggcttcccctggagagagcgagattctccgcgctgtagaagtcaccattgttgtgcacgacgacatcattccgtggcgttatccagctaagcgcgaactgcaatttggagaatggcagcgcaatgacattcttgcaggtatcttcgagccagccacgatcgacattgatctggctatcttgctgacaaaagcaagagaacatagcgttgccttggtaggtccagcggcggaggaactctttgatccggttcctgaacaggatctatttgaggcgctaaatgaaaccttaacgctatggaactcgccgcccgactgggctggcgatgagcgaaatgtagtgcttacgttgtcccgcatttggtacagcgcagtaaccggcaaaatcgcgccgaaggatgtcgctgccgactgggcaatggagcgcctgccggcccagtatcagcccgtcatacttgaagctagacaggcttatcttggacaagaagaagatcgcttggcctcgcgcgcagatcagttggaagaatttgtccactacgtgaaaggcgagatcaccaaggtagtcggcaaataaccctcgagccacccatgaccaaaatcccttaacgtgagttacgcgtcgttccactgagcgtcagaccccgtagaaaagatcaaaggatcttcttgagatcctttttttctgcgcgtaatctgctgcttgcaaacaaaaaaaccaccgctaccagcggtggtttgtttgccggatcaagagctaccaactctttttccgaaggtaactggcttcagcagagcgcagataccaaatactgtccttctagtgtagccgtagttaggccaccacttcaagaactctgtagcaccgcctacatacctcgctctgctaatcctgttaccagtggctgctgccagtggcgataagtcgtgtcttaccgggttggactcaagacgatagttaccggataaggcgcagcggtcgggctgaacggggggttcgtgcacacagcccagcttggagcgaacgacctacaccgaactgagatacctacagcgtgagcattgagaaagcgccacgcttcccgaagggagaaaggcggacaggtatccggtaagcggcagggtcggaacaggagagcgcacgagggagcttccagggggaaacgcctggtatctttatagtcctgtcgggtttcgccacctctgacttgagcgtcgatttttgtgatgctcgtcaggggggcggagcctatggaaaaacgccagcaacgcggcctttttacggttcctggccttttgctggccttttgctcacatgtt

SEQ ID NO: 70 - DNA, 9204 bp, Artificial Sequence
  Synthetic Polynucleotide
cccggggttattaatagtaatcaattacggggtcattagttcatagcccatatatggagttccgcgttacataacttacggtaaatggcccgcctggctgaccgcccaacgacccccgcccattgacgtcaataatgacgtatgttcccatagtaacgccaatagggactttccattgacgtcaatgggtggagtatttacggtaaactgcccacttggcagtacatcaagtgtatcatatgccaagtacgccccctattgacgtcaatgacggtaaatggcccgcctggcattatgcccagtacatgaccttatgggactttcctacttggcagtacatctacgtattagtcatcgctattaccatggtgatgcggttttggcagtacatcaatgggcgtggatagcggtttgactcacggggatttccaagtctccaccccattgacgtcaatgggagtttgttttggcaccaaaatcaacgggactttccaaaatgtcgtaacaactccgccccattgacgcaaatgggcggtaggcgtgtacggtgggaggtctatataagcagagctctctggctaactgtcgggatcaacaagtttgtacaaaaaagcaggctccgaattcaccggtgccgccaccatggtgagcaagggcgaggcagtgatcaaggagttcatgcggttcaaggtgcacatggagggctccatgaacggccacgagttcgagatcgagggcgagggcgagggccgcccctacgagggcacccagaccgccaagtgcctttcatacgagaccgagatcctgactgtcgagtacggattgcttcctatcggcaaaatcgtggagaagaggattgaatgtaccgtctattcagtcgataataatgggaacatctacacacagcccgtggctcaatggcacgacagaggagagcaggaagtttttgaatactgtctcgaggacggatccctcatccgcgctactaaagatcataagtttatgaccgtggacggccagatgctgccaattgacgaaatttttgaacgagagctggatctgatgagagtcgacaaccttccaaacggtggaggggggtcaggctctgcgcagctggaaaaggagcttcaagccctcgaaaaaaagttggcccagctcgagtgggagaaccaggctctggagaaagaactggcccagtgattaattaagaattcgacccagctttcttgtacaaagtggttggtaagcctatccctaaccctctcctcggtctcgattctacgtagtaatgagctagcagtctcgaggttaacgaattccgccccccccctaacgttactggccgaagccgcttggaataaggccggtgtgcgcttgtctatatgttattttccaccatattgccgtcttttggcaatgtgagggcccggaaacctggccctgtcttcttgacgagcattcctaggggtctttcccctctcgccaaaggaatgcaaggtctgttgaatgtcgtgaaggaagcagttcctctggaagcttcttgaagacaaacaacgtctgtagcgaccctttgcaggcagcggaaccccccacctggcgacaggtgcccctgcggccaaaagccacgtgtataagatacacctgcaaaggcggcacaaccccagtgccacgttgtgagttggatagttgtggaaagagtcaaatggctctcctcaagcgtattcaacaaggggctgaaggatgcccagaaggtaccccattgtatgggatctgatctggggcctcggtgcacatgctttacatgtgtttagtcgaggttaaaaaaacgtctaggccccccgaaccacggggacgtggttttcctttgaaaaacacgataataccatggccatgagcgagctgattaaggagaacatgcacatgaagctgtacatggagggcaccgtggacaaccatcacttcaagtgcacatccgagggcgaaggcaagccctacgagggcacccagaccatgagaatcaaggtggtcgagggcggccctctccccttcgccttcgacatcctggctactagcttcctctacggcagcaagaccttcatcaaccacacccagggcatccccgacttcttcaagcagtccttccctgagggcttcacatgggagagagtcaccacatacgaagacgggggcgtgctgaccgctacccaggacaccagcctccaggacggctgcctcatctacaacgtcaagatcagaggggtgaacttcacatccaacggccctgtgatgcagaagaaaacactcggctgggaggccttcaccgagacgctgtaccccgctgacggcggcctggaaggcagaaacgacatggccctgaagctcgtgggcgggagccatctgatcgcaaacatcaagaccacatatagatccaagaaacccgctaagaacctcaagatgcctggcgtctactatgtggactacagactggaaagaatcaaggaggccaacaacgagacctacgtcgagcagcacgaggtggcagtggccagatactgcgacctccctagcaaactggggcacaagcttaattaacaccggtggcgcgttaagtcgacaatcaacctctggattacaaaatttgtgaaagattgactggtattcttaactatgttgctccttttacgctatgtggatacgctgctttaatgcctttgtatcatgctattgcttcccgtatggctttcattttctcctccttgtataaatcctggttgctgtctctttatgaggagttgtggcccgttgtcaggcaacgtggcgtggtgtgcactgtgtttgctgacgcaacccccactggttggggcattgccaccacctgtcagctcctttccgggactttcgctttccccctccctattgccacggcggaactcatcgccgcctgccttgcccgctgctggacaggggctcggctgttgggcactgacaattccgtggtgttgtcggggaaatcatcgtcctttccttggctgctcgcctgtgttgccacctggattctgcgcgggacgtccttctgctacgtcccttcggccctcaatccagcggaccttccttcccgcggcctgctgccggctctgcggcctcttccgcgtcttcgccttcgccctcagacgagtcggatctccctttgggccgcctccccgcgtcgactttaagaccaatgacttacaaggcagctgtagatcttagccactttttaaaagaaaaggggggactggaagggctaattcactcccaacgaagacaagatctgctttttgcttgtactgggtctctctggttagaccagatctgagcctgggagctctctggctaactagggaacccactgcttaagcctcaataaagcttgccttgagtgcttcaagtagtgtgtgcccgtctgttgtgtgactctggtaactagagatccctcagacccttttagtcagtgtggaaaatctctagcagtacgtatagtagttcatgtcatcttattattcagtatttataacttgcaaagaaatgaatatcagagagtgagaggaacttgtttattgcagcttataatggttacaaataaagcaatagcatcacaaatttcacaaataaagcatttttttcactgcattctagttgtggtttgtccaaactcatcaatgtatcttatcatgtctggctctagctatcccgcccctaactccgcccatcccgcccctaactccgcccagttccgcccattctccgccccatggctgactaattttttttatttatgcagaggccgaggccgcctcggcctctgagctattccagaagtagtgaggaggcttttttggaggcctagggacgtacccaattcgccctatagtgagtcgtattacgcgcgctcactggccgtcgttttacaacgtcgtgactgggaaaaccctggcgttacccaacttaatcgccttgcagcacatccccctttcgccagctggcgtaatagcgaagaggcccgcaccgatcgcccttcccaacagttgcgcagcctgaatggcgaatgggacgcgccctgtagcggcgcattaagcgcggcgggtgtggtggttacgcgcagcgtgaccgctacacttgccagcgccctagcgcccgctcctttcgctttcttcccttcctttctcgccacgttcgccggctttccccgtcaagctctaaatcgggggctccctttagggttccgatttagtgctttacggcacctcgaccccaaaaaacttgattagggtgatggttcacgtagtgggccatcgccctgatagacggtttttcgccctttgacgttggagtccacgttctttaatagtggactcttgttccaaactggaacaacactcaaccctatctcggtctattcttttgatttataagggattttgccgatttcggcctattggttaaaaaatgagctgatttaacaaaaatttaacgcgaattttaacaaaatattaacgcttacaatttaggtggcacttttcggggaaatgtgcgcggaacccctatttgtttatttttctaaatacattcaaatatgtatccgctcatgagacaataaccctgataaatgcttcaataatattgaaaaaggaagagtatgagtattcaacatttccgtgtcgcccttattcccttttttgcggcattttgccttcctgtttttgctcacccagaaacgctggtgaaagtaaaagatgctgaagatcagttgggtgcacgagtgggttacatcgaactggatctcaacagcggtaagatccttgagagttttcgccccgaagaacgttttccaatgatgagcacttttaaagttctgctatgtggcgcggtattatcccgtattgacgccgggcaagagcaactcggtcgccgcatacactattctcagaatgacttggttgagtactcaccagtcacagaaaagcatcttacggatggcatgacagtaagagaattatgcagtgctgccataaccatgagtgataacactgcggccaacttacttctgacaacgatcggaggaccgaaggagctaaccgcttttttgcacaacatgggggatcatgtaactcgccttgatcgttgggaaccggagctgaatgaagccataccaaacgacgagcgtgacaccacgatgcctgtagcaatggcaacaacgttgcgcaaactattaactggcgaactacttactctagcttcccggcaacaattaatagactggatggaggcggataaagttgcaggaccacttctgcgctcggcccttccggctggctggtttattgctgataaatctggagccggtgagcgtgggtctcgcggtatcattgcagcactggggccagatggtaagccctcccgtatcgtagttatctacacgacggggagtcaggcaactatggatgaacgaaatagacagatcgctgagataggtgcctcactgattaagcattggtaactgtcagaccaagtttactcatatatactttagattgatttaaaacttcatttttaatttaaaaggatctaggtgaagatcctttttgataatctcatgaccaaaatcccttaacgtgagttttcgttccactgagcgtcagaccccgtagaaaagatcaaaggatcttcttgagatcctttttttctgcgcgtaatctgctgcttgcaaacaaaaaaaccaccgctaccagcggtggtttgtttgccggatcaagagctaccaactctttttccgaaggtaactggcttcagcagagcgcagataccaaatactgttcttctagtgtagccgtagttaggccaccacttcaagaactctgtagcaccgcctacatacctcgctctgctaatcctgttaccagtggctgctgccagtggcgataagtcgtgtcttaccgggttggactcaagacgatagttaccggataaggcgcagcggtcgggctgaacggggggttcgtgcacacagcccagcttggagcgaacgacctacaccgaactgagatacctacagcgtgagctatgagaaagcgccacgcttcccgaagggagaaaggcggacaggtatccggtaagcggcagggtcggaacaggagagcgcacgagggagcttccagggggaaacgcctggtatctttatagtcctgtcgggtttcgccacctctgacttgagcgtcgatttttgtgatgctcgtcaggggggcggagcctatggaaaaacgccagcaacgcggcctttttacggttcctggccttttgctggccttttgctcacatgttctttcctgcgttatcccctgattctgtggataaccgtattaccgcctttgagtgagctgataccgctcgccgcagccgaacgaccgagcgcagcgagtcagtgagcgaggaagcggaagagcgcccaatacgcaaaccgcctctccccgcgcgttggccgattcattaatgcagctggcacgacaggtttcccgactggaaagcgggcagtgagcgcaacgcaattaatgtgagttagctcactcattaggcaccccaggctttacactttatgcttccggctcgtatgttgtgtggaattgtgagcggataacaatttcacacaggaaacagctatgaccatgattacgccaagcgcgcaattaaccctcactaaagggaacaaaagctggagctgcaagcttaatgtagtcttatgcaatactcttgtagtcttgcaacatggtaacgatgagttagcaacatgccttacaaggagagaaaaagcaccgtgcatgccgattggtggaagtaaggtggtacgatcgtgccttattaggaaggcaacagacgggtctgacatggattggacgaaccactgaattgccgcattgcagagatattgtatttaagtgcctagctcgatacataaacgggtctctctggttagaccagatctgagcctgggagctctctggctaactagggaacccactgcttaagcctcaataaagcttgccttgagtgcttcaagtagtgtgtgcccgtctgttgtgtgactctggtaactagagatccctcagacccttttagtcagtgtggaaaatctctagcagtggcgcccgaacagggacttgaaagcgaaagggaaaccagaggagctctctcgacgcaggactcggcttgctgaagcgcgcacggcaagaggcgaggggcggcgactggtgagtacgccaaaaattttgactagcggaggctagaaggagagagatgggtgcgagagcgtcagtattaagcgggggagaattagatcgcgatgggaaaaaattcggttaaggccagggggaaagaaaaaatataaattaaaacatatagtatgggcaagcagggagctagaacgattcgcagttaatcctggcctgttagaaacatcagaaggctgtagacaaatactgggacagctacaaccatcccttcagacaggatcagaagaacttagatcattatataatacagtagcaaccctctattgtgtgcatcaaaggatagagataaaagacaccaaggaagctttagacaagatagaggaagagcaaaacaaaagtaagaccaccgcacagcaagcggccgctgatcttcagacctggaggaggagatatgagggacaattggagaagtgaattatataaatataaagtagtaaaaattgaaccattaggagtagcacccaccaaggcaaagagaagagtggtgcagagagaaaaaagagcagtgggaataggagctttgttccttgggttcttgggagcagcaggaagcactatgggcgcagcgtcaatgacgctgacggtacaggccagacaattattgtctggtatagtgcagcagcagaacaatttgctgagggctattgaggcgcaacagcatctgttgcaactcacagtctggggcatcaagcagctccaggcaagaatcctggctgtggaaagatacctaaaggatcaacagctcctggggatttggggttgctctggaaaactcatttgcaccactgctgtgccttggaatgctagttggagtaataaatctctggaacagatttggaatcacacgacctggatggagtgggacagagaaattaacaattacacaagcttaatacactccttaattgaagaatcgcaaaaccagcaagaaaagaatgaacaagaattattggaattagataaatgggcaagtttgtggaattggtttaacataacaaattggctgtggtatataaaattattcataatgatagtaggaggcttggtaggtttaagaatagtttttgctgtactttctatagtgaatagagttaggcagggatattcaccattatcgtttcagacccacctcccaaccccgaggggacccttgcgccttttccaaggcagccctgggtttgcgcagggacgcggctgctctgggcgtggttccgggaaacgcagcggcgccgaccctgggtctcgcacattcttcacgtccgttcgcagcgtcacccggatcttcgccgctacccttgtgggccccccggcgacgcttcctgctccgcccctaagtcgggaaggttccttgcggttcgcggcgtgccggacgtgacaaacggaagccgcacgtctcactagtaccctcgcagacggacagcgccagggagcaatggcagcgcgccgaccgcgatgggctgtggccaatagcggctgctcagcagggcgcgccgagagcagcggccgggaaggggcggtgcgggaggcggggtgtggggcggtagtgtgggccctgttcctgcccgcgcggtgttccgcattctgcaagcctccggagcgcacgtcggcagtcggctccctcgttgaccgaatcaccgacctctctccccagggggtacccagctgtctagagaattctagatcttgagacaaatggcagtattcatccacaattttaaaagaaaaggggggattggggggtacagtgcaggggaaagaatagtagacataatagcaacagacatacaaactaaagaattacaaaaacaaattacaaaaattcaaaattttcgggtttattacagggacagcagagatccactttggcgccggctcgaggggg

SEQ ID NO: 71 - protein, 185 aa, Artificial Sequence
  Synthetic Polypeptide
MVSKGEAVIKEFMRFKVHMEGSMNGHEFEIEGEGEGRPYEGTQTAKCLSYETEILTVEYGLLPIGKIVEKRIECTVYSVDNNGNIYTQPVAQWHDRGEQEVFEYCLEDGSLIRATKDHKFMTVDGQMLPIDEIFERELDLMRVDNLPNGGGGSGSAQLEKELQALEKKLAQLEWENQALEKELAQ

SEQ ID NO: 72 - DNA, 9444 bp, Artificial Sequence
  Synthetic Polynucleotide
cccggggttattaatagtaatcaattacggggtcattagttcatagcccatatatggagttccgcgttacataacttacggtaaatggcccgcctggctgaccgcccaacgacccccgcccattgacgtcaataatgacgtatgttcccatagtaacgccaatagggactttccattgacgtcaatgggtggagtatttacggtaaactgcccacttggcagtacatcaagtgtatcatatgccaagtacgccccctattgacgtcaatgacggtaaatggcccgcctggcattatgcccagtacatgaccttatgggactttcctacttggcagtacatctacgtattagtcatcgctattaccatggtgatgcggttttggcagtacatcaatgggcgtggatagcggtttgactcacggggatttccaagtctccaccccattgacgtcaatgggagtttgttttggcaccaaaatcaacgggactttccaaaatgtcgtaacaactccgccccattgacgcaaatgggcggtaggcgtgtacggtgggaggtctatataagcagagctctctggctaactgtcgggatcaacaagtttgtacaaaaaagcaggctccgaattcaccggtgccgccaccatggctcaactgaagaagaaactccaggccaataagaaagaactggcacagctgaagtggaagctgcaggcactgaaaaagaagctggcacagggcggaggaggctcaggcagtatgattaagatcgctacgcggaagtacctggggaaacagaacgtctacgacataggtgtggagcgcgatcacaactttgctctgaaaaatggatttatcgccagcaactgcctgaaggtgaccaagggtggccccctgcccttctcctgggacatcctgtcccctcagttcatgtacggctccagggccttcaccaagcaccccgccgacatccccgactactataagcagtccttccccgagggcttcaagtgggagcgcgtgatgaacttcgaggacggcggcgccgtgaccgtgacccaggacacctccctggaggacggcaccctgatctacaaggtgaagctccgcggcaccaacttccctcctgacggccccgtaatgcagaagaagacaatgggctgggaagcgtccaccgagcggttgtaccccgaggacggcgtgctgaagggcgacattaagatggccctgcgcctgaaggacggcggccgctacctggcggacttcaagaccacctacaaggccaagaagcccgtgcagatgcccggcgcctacaacgtcgaccgcaagttggacatcacctcccacaacgaggactacaccgtggtggaacagtacgaacgctccgagggccgccactccaccggcggcatggacgagctgtacaagtgattaattaagaattcgacccagctttcttgtacaaagtggttggtaagcctatccctaaccctctcctcggtctcgattctacgtagtaatgagctagcagtctcgaggttaacgaattccgccccccccctaacgttactggccgaagccgcttggaataaggccggtgtgcgcttgtctatatgttattttccaccatattgccgtcttttggcaatgtgagggcccggaaacctggccctgtcttcttgacgagcattcctaggggtctttcccctctcgccaaaggaatgcaaggtctgttgaatgtcgtgaaggaagcagttcctctggaagcttcttgaagacaaacaacgtctgtagcgaccctttgcaggcagcggaaccccccacctggcgacaggtgcccctgcggccaaaagccacgtgtataagatacacctgcaaaggcggcacaaccccagtgccacgttgtgagttggatagttgtggaaagagtcaaatggctctcctcaagcgtattcaacaaggggctgaaggatgcccagaaggtaccccattgtatgggatctgatctggggcctcggtgcacatgctttacatgtgtttagtcgaggttaaaaaaacgtctaggccccccgaaccacggggacgtggttttcctttgaaaaacacgataataccatggtgagcaagggcgaggagctgttcaccggggtggtgcccatcctggtcgagctggacggcgacgtaaacggccacaagttcagcgtgtccggcgagggcgagggcgatgccacctacggcaagctgaccctgaagttcatctgcaccaccggcaagctgcccgtgccctggcccaccctcgtgaccaccctgacctacggcgtgcagtgcttcagccgctaccccgaccacatgaagcagcacgacttcttcaagtccgccatgcccgaaggctacgtccaggagcgcaccatcttcttcaaggacgacggcaactacaagacccgcgccgaggtgaagttcgagggcgacaccctggtgaaccgcatcgagctgaagggcatcgacttcaaggaggacggcaacatcctggggcacaagctggagtacaactacaacagccacaacgtctatatcatggccgacaagcagaagaacggcatcaaggtgaacttcaagatccgccacaacatcgaggacggcagcgtgcagctcgccgaccactaccagcagaacacccccatcggcgacggccccgtgctgctgcccgacaaccactacctgagcacccagtccgccctgagcaaagaccccaacgagaagcgcgatcacatggtcctgctggagttcgtgaccgccgccgggatcactctcggcatggacgagctgtacaagtaacaccggtggcgcgttaagtcgacaatcaacctctggattacaaaatttgtgaaagattgactggtattcttaactatgttgctccttttacgctatgtggatacgctgctttaatgcctttgtatcatgctattgcttcccgtatggctttcattttctcctccttgtataaatcctggttgctgtctctttatgaggagttgtggcccgttgtcaggcaacgtggcgtggtgtgcactgtgtttgctgacgcaacccccactggttggggcattgccaccacctgtcagctcctttccgggactttcgctttccccctccctattgccacggcggaactcatcgccgcctgccttgcccgctgctggacaggggctcggctgttgggcactgacaattccgtggtgttgtcggggaaatcatcgtcctttccttggctgctcgcctgtgttgccacctggattctgcgcgggacgtccttctgctacgtcccttcggccctcaatccagcggaccttccttcccgcggcctgctgccggctctgcggcctcttccgcgtcttcgccttcgccctcagacgagtcggatctccctttgggccgcctccccgcgtcgactttaagaccaatgacttacaaggcagctgtagatcttagccactttttaaaagaaaaggggggactggaagggctaattcactcccaacgaagacaagatctgctttttgcttgtactgggtctctctggttagaccagatctgagcctgggagctctctggctaactagggaacccactgcttaagcctcaataaagcttgccttgagtgcttcaagtagtgtgtgcccgtctgttgtgtgactctggtaactagagatccctcagacccttttagtcagtgtggaaaatctctagcagtacgtatagtagttcatgtcatcttattattcagtatttataacttgcaaagaaatgaatatcagagagtgagaggaacttgtttattgcagcttataatggttacaaataaagcaatagcatcacaaatttcacaaataaagcatttttttcactgcattctagttgtggtttgtccaaactcatcaatgtatcttatcatgtctggctctagctatcccgcccctaactccgcccatcccgcccctaactccgcccagttccgcccattctccgccccatggctgactaattttttttatttatgcagaggccgaggccgcctcggcctctgagctattccagaagtagtgaggaggcttttttggaggcctagggacgtacccaattcgccctatagtgagtcgtattacgcgcgctcactggccgtcgttttacaacgtcgtgactgggaaaaccctggcgttacccaacttaatcgccttgcagcacatccccctttcgccagctggcgtaatagcgaagaggcccgcaccgatcgcccttcccaacagttgcgcagcctgaatggcgaatgggacgcgccctgtagcggcgcattaagcgcggcgggtgtggtggttacgcgcagcgtgaccgctacacttgccagcgccctagcgcccgctcctttcgctttcttcccttcctttctcgccacgttcgccggctttccccgtcaagctctaaatcgggggctccctttagggttccgatttagtgctttacggcacctcgaccccaaaaaacttgattagggtgatggttcacgtagtgggccatcgccctgatagacggtttttcgccctttgacgttggagtccacgttctttaatagtggactcttgttccaaactggaacaacactcaaccctatctcggtctattcttttgatttataagggattttgccgatttcggcctattggttaaaaaatgagctgatttaacaaaaatttaacgcgaattttaacaaaatattaacgcttacaatttaggtggcacttttcggggaaatgtgcgcggaacccctatttgtttatttttctaaatacattcaaatatgtatccgctcatgagacaataaccctgataaatgcttcaataatattgaaaaaggaagagtatgagtattcaacatttccgtgtcgcccttattcccttttttgcggcattttgccttcctgtttttgctcacccagaaacgctggtgaaagtaaaagatgctgaagatcagttgggtgcacgagtgggttacatcgaactggatctcaacagcggtaagatccttgagagttttcgccccgaagaacgttttccaatgatgagcacttttaaagttctgctatgtggcgcggtattatcccgtattgacgccgggcaagagcaactcggtcgccgcatacactattctcagaatgacttggttgagtactcaccagtcacagaaaagcatcttacggatggcatgacagtaagagaattatgcagtgctgccataaccatgagtgataacactgcggccaacttacttctgacaacgatcggaggaccgaaggagctaaccgcttttttgcacaacatgggggatcatgtaactcgccttgatcgttgggaaccggagctgaatgaagccataccaaacgacgagcgtgacaccacgatgcctgtagcaatggcaacaacgttgcgcaaactattaactggcgaactacttactctagcttcccggcaacaattaatagactggatggaggcggataaagttgcaggaccacttctgcgctcggcccttccggctggctggtttattgctgataaatctggagccggtgagcgtgggtctcgcggtatcattgcagcactggggccagatggtaagccctcccgtatcgtagttatctacacgacggggagtcaggcaactatggatgaacgaaatagacagatcgctgagataggtgcctcactgattaagcattggtaactgtcagaccaagtttactcatatatactttagattgatttaaaacttcatttttaatttaaaaggatctaggtgaagatcctttttgataatctcatgaccaaaatcccttaacgtgagttttcgttccactgagcgtcagaccccgtagaaaagatcaaaggatcttcttgagatcctttttttctgcgcgtaatctgctgcttgcaaacaaaaaaaccaccgctaccagcggtggtttgtttgccggatcaagagctaccaactctttttccgaaggtaactggcttcagcagagcgcagataccaaatactgttcttctagtgtagccgtagttaggccaccacttcaagaactctgtagcaccgcctacatacctcgctctgctaatcctgttaccagtggctgctgccagtggcgataagtcgtgtcttaccgggttggactcaagacgatagttaccggataaggcgcagcggtcgggctgaacggggggttcgtgcacacagcccagcttggagcgaacgacctacaccgaactgagatacctacagcgtgagctatgagaaagcgccacgcttcccgaagggagaaaggcggacaggtatccggtaagcggcagggtcggaacaggagagcgcacgagggagcttccagggggaaacgcctggtatctttatagtcctgtcgggtttcgccacctctgacttgagcgtcgatttttgtgatgctcgtcaggggggcggagcctatggaaaaacgccagcaacgcggcctttttacggttcctggccttttgctggccttttgctcacatgttctttcctgcgttatcccctgattctgtggataaccgtattaccgcctttgagtgagctgataccgctcgccgcagccgaacgaccgagcgcagcgagtcagtgagcgaggaagcggaagagcgcccaatacgcaaaccgcctctccccgcgcgttggccgattcattaatgcagctggcacgacaggtttcccgactggaaagcgggcagtgagcgcaacgcaattaatgtgagttagctcactcattaggcaccccaggctttacactttatgcttccggctcgtatgttgtgtggaattgtgagcggataacaatttcacacaggaaacagctatgaccatgattacgccaagcgcgcaattaaccctcactaaagggaacaaaagctggagctgcaagcttaatgtagtcttatgcaatactcttgtagtcttgcaacatggtaacgatgagttagcaacatgccttacaaggagagaaaaagcaccgtgcatgccgattggtggaagtaaggtggtacgatcgtgccttattaggaaggcaacagacgggtctgacatggattggacgaaccactgaattgccgcattgcagagatattgtatttaagtgcctagctcgatacataaacgggtctctctggttagaccagatctgagcctgggagctctctggctaactagggaacccactgcttaagcctcaataaagcttgccttgagtgcttcaagtagtgtgtgcccgtctgttgtgtgactctggtaactagagatccctcagacccttttagtcagtgtggaaaatctctagcagtggcgcccgaacagggacttgaaagcgaaagggaaaccagaggagctctctcgacgcaggactcggcttgctgaagcgcgcacggcaagaggcgaggggcggcgactggtgagtacgccaaaaattttgactagcggaggctagaaggagagagatgggtgcgagagcgtcagtattaagcgggggagaattagatcgcgatgggaaaaaattcggttaaggccagggggaaagaaaaaatataaattaaaacatatagtatgggcaagcagggagctagaacgattcgcagttaatcctggcctgttagaaacatcagaaggctgtagacaaatactgggacagctacaaccatcccttcagacaggatcagaagaacttagatcattatataatacagtagcaaccctctattgtgtgcatcaaaggatagagataaaagacaccaaggaagctttagacaagatagaggaagagcaaaacaaaagtaagaccaccgcacagcaagcggccgctgatcttcagacctggaggaggagatatgagggacaattggagaagtgaattatataaatataaagtagtaaaaattgaaccattaggagtagcacccaccaaggcaaagagaagagtggtgcagagagaaaaaagagcagtgggaataggagctttgttccttgggttcttgggagcagcaggaagcactatgggcgcagcgtcaatgacgctgacggtacaggccagacaattattgtctggtatagtgcagcagcagaacaatttgctgagggctattgaggcgcaacagcatctgttgcaactcacagtctggggcatcaagcagctccaggcaagaatcctggctgtggaaagatacctaaaggatcaacagctcctggggatttggggttgctctggaaaactcatttgcaccactgctgtgccttggaatgctagttggagtaataaatctctggaacagatttggaatcacacgacctggatggagtgggacagagaaattaacaattacacaagcttaatacactccttaattgaagaatcgcaaaaccagcaagaaaagaatgaacaagaattattggaattagataaatgggcaagtttgtggaattggtttaacataacaaattggctgtggtatataaaattattcataatgatagtaggaggcttggtaggtttaagaatagtttttgctgtactttctatagtgaatagagttaggcagggatattcaccattatcgtttcagacccacctcccaaccccgaggggacccttgcgccttttccaaggcagccctgggtttgcgcagggacgcggctgctctgggcgtggttccgggaaacgcagcggcgccgaccctgggtctcgcacattcttcacgtccgttcgcagcgtcacccggatcttcgccgctacccttgtgggccccccggcgacgcttcctgctccgcccctaagtcgggaaggttccttgcggttcgcggcgtgccggacgtgacaaacggaagccgcacgtctcactagtaccctcgcagacggacagcgccagggagcaatggcagcgcgccgaccgcgatgggctgtggccaatagcggctgctcagcagggcgcgccgagagcagcggccgggaaggggcggtgcgggaggcggggtgtggggcggtagtgtgggccctgttcctgcccgcgcggtgttccgcattctgcaagcctccggagcgcacgtcggcagtcggctccctcgttgaccgaatcaccgacctctctccccagggggtacccagctgtctagagaattctagatcttgagacaaatggcagtattcatccacaattttaaaagaaaaggggggattggggggtacagtgcaggggaaagaatagtagacataatagcaacagacatacaaactaaagaattacaaaaacaaattacaaaaattcaaaattttcgggtttattacagggacagcagagatccactttggcgccggctcgaggggg

SEQ ID NO: 73 - protein, 261 aa, Artificial Sequence
  Synthetic Polypeptide
MAQLKKKLQANKKELAQLKWKLQALKKKLAQGGGGSGSMIKIATRKYLGKQNVYDIGVERDHNFALKNGFIASNCLKVTKGGPLPFSWDILSPQFMYGSRAFTKHPADIPDYYKQSFPEGFKWERVMNFEDGGAVTVTQDTSLEDGTLIYKVKLRGTNFPPDGPVMQKKTMGWEASTERLYPEDGVLKGDIKMALRLKDGGRYLADFKTTYKAKKPVQMPGAYNVDRKLDITSHNEDYTVVEQYERSEGRHSTGGMDELYK

SEQ ID NO: 74 - DNA, 9210 bp, Artificial Sequence
  Synthetic Polynucleotide
cccggggttattaatagtaatcaattacggggtcattagttcatagcccatatatggagttccgcgttacataacttacggtaaatggcccgcctggctgaccgcccaacgacccccgcccattgacgtcaataatgacgtatgttcccatagtaacgccaatagggactttccattgacgtcaatgggtggagtatttacggtaaactgcccacttggcagtacatcaagtgtatcatatgccaagtacgccccctattgacgtcaatgacggtaaatggcccgcctggcattatgcccagtacatgaccttatgggactttcctacttggcagtacatctacgtattagtcatcgctattaccatggtgatgcggttttggcagtacatcaatgggcgtggatagcggtttgactcacggggatttccaagtctccaccccattgacgtcaatgggagtttgttttggcaccaaaatcaacgggactttccaaaatgtcgtaacaactccgccccattgacgcaaatgggcggtaggcgtgtacggtgggaggtctatataagcagagctctctggctaactgtcgggatcaacaagtttgtacaaaaaagcaggctccgaattcaccggtgccgccaccatggtgagcaagggcgaggcagtgatcaaggagttcatgcggttcaaggtgcacatggagggctccatgaacggccacgagttcgagatcgagggcgagggcgagggccgcccctacgagggcacccagaccgccaagctgaagtgcctttcatacgagaccgagatcctgactgtcgagtacggattgcttcctatcggcaaaatcgtggagaagaggattgaatgtaccgtctattcagtcgataataatgggaacatctacacacagcccgtggctcaatggcacgacagaggagagcaggaagtttttgaatactgtctcgaggacggatccctcatccgcgctactaaagatcataagtttatgaccgtggacggccagatgctgccaattgacgaaatttttgaacgagagctggatctgatgagagtcgacaaccttccaaacggtggaggggggtcaggctctgcgcagctggaaaaggagcttcaagccctcgaaaaaaagttggcccagctcgagtgggagaaccaggctctggagaaagaactggcccagtgattaattaagaattcgacccagctttcttgtacaaagtggttggtaagcctatccctaaccctctcctcggtctcgattctacgtagtaatgagctagcagtctcgaggttaacgaattccgccccccccctaacgttactggccgaagccgcttggaataaggccggtgtgcgcttgtctatatgttattttccaccatattgccgtcttttggcaatgtgagggcccggaaacctggccctgtcttcttgacgagcattcctaggggtctttcccctctcgccaaaggaatgcaaggtctgttgaatgtcgtgaaggaagcagttcctctggaagcttcttgaagacaaacaacgtctgtagcgaccctttgcaggcagcggaaccccccacctggcgacaggtgcccctgcggccaaaagccacgtgtataagatacacctgcaaaggcggcacaaccccagtgccacgttgtgagttggatagttgtggaaagagtcaaatggctctcctcaagcgtattcaacaaggggctgaaggatgcccagaaggtaccccattgtatgggatctgatctggggcctcggtgcacatgctttacatgtgtttagtcgaggttaaaaaaacgtctaggccccccgaaccacggggacgtggttttcctttgaaaaacacgataataccatggccatgagcgagctgattaaggagaacatgcacatgaagctgtacatggagggcaccgtggacaaccatcacttcaagtgcacatccgagggcgaaggcaagccctacgagggcacccagaccatgagaatcaaggtggtcgagggcggccctctccccttcgccttcgacatcctggctactagcttcctctacggcagcaagaccttcatcaaccacacccagggcatccccgacttcttcaagcagtccttccctgagggcttcacatgggagagagtcaccacatacgaagacgggggcgtgctgaccgctacccaggacaccagcctccaggacggctgcctcatctacaacgtcaagatcagaggggtgaacttcacatccaacggccctgtgatgcagaagaaaacactcggctgggaggccttcaccgagacgctgtaccccgctgacggcggcctggaaggcagaaacgacatggccctgaagctcgtgggcgggagccatctgatcgcaaacatcaagaccacatatagatccaagaaacccgctaagaacctcaagatgcctggcgtctactatgtggactacagactggaaagaatcaaggaggccaacaacgagacctacgtcgagcagcacgaggtggcagtggccagatactgcgacctccctagcaaactggggcacaagcttaattaacaccggtggcgcgttaagtcgacaatcaacctctggattacaaaatttgtgaaagattgactggtattcttaactatgttgctccttttacgctatgtggatacgctgctttaatgcctttgtatcatgctattgcttcccgtatggctttcattttctcctccttgtataaatcctggttgctgtctctttatgaggagttgtggcccgttgtcaggcaacgtggcgtggtgtgcactgtgtttgctgacgcaacccccactggttggggcattgccaccacctgtcagctcctttccgggactttcgctttccccctccctattgccacggcggaactcatcgccgcctgccttgcccgctgctggacaggggctcggctgttgggcactgacaattccgtggtgttgtcggggaaatcatcgtcctttccttggctgctcgcctgtgttgccacctggattctgcgcgggacgtccttctgctacgtcccttcggccctcaatccagcggaccttccttcccgcggcctgctgccggctctgcggcctcttccgcgtcttcgccttcgccctcagacgagtcggatctccctttgggccgcctccccgcgtcgactttaagaccaatgacttacaaggcagctgtagatcttagccactttttaaaagaaaaggggggactggaagggctaattcactcccaacgaagacaagatctgctttttgcttgtactgggtctctctggttagaccagatctgagcctgggagctctctggctaactagggaacccactgcttaagcctcaataaagcttgccttgagtgcttcaagtagtgtgtgcccgtctgttgtgtgactctggtaactagagatccctcagacccttttagtcagtgtggaaaatctctagcagtacgtatagtagttcatgtcatcttattattcagtatttataacttgcaaagaaatgaatatcagagagtgagaggaacttgtttattgcagcttataatggttacaaataaagcaatagcatcacaaatttcacaaataaagcatttttttcactgcattctagttgtggtttgtccaaactcatcaatgtatcttatcatgtctggctctagctatcccgcccctaactccgcccatcccgcccctaactccgcccagttccgcccattctccgccccatggctgactaattttttttatttatgcagaggccgaggccgcctcggcctctgagctattccagaagtagtgaggaggcttttttggaggcctagggacgtacccaattcgccctatagtgagtcgtattacgcgcgctcactggccgtcgttttacaacgtcgtgactgggaaaaccctggcgttacccaacttaatcgccttgcagcacatccccctttcgccagctggcgtaatagcgaagaggcccgcaccgatcgcccttcccaacagttgcgcagcctgaatggcgaatgggacgcgccctgtagcggcgcattaagcgcggcgggtgtggtggttacgcgcagcgtgaccgctacacttgccagcgccctagcgcccgctcctttcgctttcttcccttcctttctcgccacgttcgccggctttccccgtcaagctctaaatcgggggctccctttagggttccgatttagtgctttacggcacctcgaccccaaaaaacttgattagggtgatggttcacgtagtgggccatcgccctgatagacggtttttcgccctttgacgttggagtccacgttctttaatagtggactcttgttccaaactggaacaacactcaaccctatctcggtctattcttttgatttataagggattttgccgatttcggcctattggttaaaaaatgagctgatttaacaaaaatttaacgcgaattttaacaaaatattaacgcttacaatttaggtggcacttttcggggaaatgtgcgcggaacccctatttgtttatttttctaaatacattcaaatatgtatccgctcatgagacaataaccctgataaatgcttcaataatattgaaaaaggaagagtatgagtattcaacatttccgtgtcgcccttattcccttttttgcggcattttgccttcctgtttttgctcacccagaaacgctggtgaaagtaaaagatgctgaagatcagttgggtgcacgagtgggttacatcgaactggatctcaacagcggtaagatccttgagagttttcgccccgaagaacgttttccaatgatgagcacttttaaagttctgctatgtggcgcggtattatcccgtattgacgccgggcaagagcaactcggtcgccgcatacactattctcagaatgacttggttgagtactcaccagtcacagaaaagcatcttacggatggcatgacagtaagagaattatgcagtgctgccataaccatgagtgataacactgcggccaacttacttctgacaacgatcggaggaccgaaggagctaaccgcttttttgcacaacatgggggatcatgtaactcgccttgatcgttgggaaccggagctgaatgaagccataccaaacgacgagcgtgacaccacgatgcctgtagcaatggcaacaacgttgcgcaaactattaactggcgaactacttactctagcttcccggcaacaattaatagactggatggaggcggataaagttgcaggaccacttctgcgctcggcccttccggctggctggtttattgctgataaatctggagccggtgagcgtgggtctcgcggtatcattgcagcactggggccagatggtaagccctcccgtatcgtagttatctacacgacggggagtcaggcaactatggatgaacgaaatagacagatcgctgagataggtgcctcactgattaagcattggtaactgtcagaccaagtttactcatatatactttagattgatttaaaacttcatttttaatttaaaaggatctaggtgaagatcctttttgataatctcatgaccaaaatcccttaacgtgagttttcgttccactgagcgtcagaccccgtagaaaagatcaaaggatcttcttgagatcctttttttctgcgcgtaatctgctgcttgcaaacaaaaaaaccaccgctaccagcggtggtttgtttgccggatcaagagctaccaactctttttccgaaggtaactggcttcagcagagcgcagataccaaatactgttcttctagtgtagccgtagttaggccaccacttcaagaactctgtagcaccgcctacatacctcgctctgctaatcctgttaccagtggctgctgccagtggcgataagtcgtgtcttaccgggttggactcaagacgatagttaccggataaggcgcagcggtcgggctgaacggggggttcgtgcacacagcccagcttggagcgaacgacctacaccgaactgagatacctacagcgtgagctatgagaaagcgccacgcttcccgaagggagaaaggcggacaggtatccggtaagcggcagggtcggaacaggagagcgcacgagggagcttccagggggaaacgcctggtatctttatagtcctgtcgggtttcgccacctctgacttgagcgtcgatttttgtgatgctcgtcaggggggcggagcctatggaaaaacgccagcaacgcggcctttttacggttcctggccttttgctggccttttgctcacatgttctttcctgcgttatcccctgattctgtggataaccgtattaccgcctttgagtgagctgataccgctcgccgcagccgaacgaccgagcgcagcgagtcagtgagcgaggaagcggaagagcgcccaatacgcaaaccgcctctccccgcgcgttggccgattcattaatgcagctggcacgacaggtttcccgactggaaagcgggcagtgagcgcaacgcaattaatgtgagttagctcactcattaggcaccccaggctttacactttatgcttccggctcgtatgttgtgtggaattgtgagcggataacaatttcacacaggaaacagctatgaccatgattacgccaagcgcgcaattaaccctcactaaagggaacaaaagctggagctgcaagcttaatgtagtcttatgcaatactcttgtagtcttgcaacatggtaacgatgagttagcaacatgccttacaaggagagaaaaagcaccgtgcatgccgattggtggaagtaaggtggtacgatcgtgccttattaggaaggcaacagacgggtctgacatggattggacgaaccactgaattgccgcattgcagagatattgtatttaagtgcctagctcgatacataaacgggtctctctggttagaccagatctgagcctgggagctctctggctaactagggaacccactgcttaagcctcaataaagcttgccttgagtgcttcaagtagtgtgtgcccgtctgttgtgtgactctggtaactagagatccctcagacccttttagtcagtgtggaaaatctctagcagtggcgcccgaacagggacttgaaagcgaaagggaaaccagaggagctctctcgacgcaggactcggcttgctgaagcgcgcacggcaagaggcgaggggcggcgactggtgagtacgccaaaaattttgactagcggaggctagaaggagagagatgggtgcgagagcgtcagtattaagcgggggagaattagatcgcgatgggaaaaaattcggttaaggccagggggaaagaaaaaatataaattaaaacatatagtatgggcaagcagggagctagaacgattcgcagttaatcctggcctgttagaaacatcagaaggctgtagacaaatactgggacagctacaaccatcccttcagacaggatcagaagaacttagatcattatataatacagtagcaaccctctattgtgtgcatcaaaggatagagataaaagacaccaaggaagctttagacaagatagaggaagagcaaaacaaaagtaagaccaccgcacagcaagcggccgctgatcttcagacctggaggaggagatatgagggacaattggagaagtgaattatataaatataaagtagtaaaaattgaaccattaggagtagcacccaccaaggcaaagagaagagtggtgcagagagaaaaaagagcagtgggaataggagctttgttccttgggttcttgggagcagcaggaagcactatgggcgcagcgtcaatgacgctgacggtacaggccagacaattattgtctggtatagtgcagcagcagaacaatttgctgagggctattgaggcgcaacagcatctgttgcaactcacagtctggggcatcaagcagctccaggcaagaatcctggctgtggaaagatacctaaaggatcaacagctcctggggatttggggttgctctggaaaactcatttgcaccactgctgtgccttggaatgctagttggagtaataaatctctggaacagatttggaatcacacgacctggatggagtgggacagagaaattaacaattacacaagcttaatacactccttaattgaagaatcgcaaaaccagcaagaaaagaatgaacaagaattattggaattagataaatgggcaagtttgtggaattggtttaacataacaaattggctgtggtatataaaattattcataatgatagtaggaggcttggtaggtttaagaatagtttttgctgtactttctatagtgaatagagttaggcagggatattcaccattatcgtttcagacccacctcccaaccccgaggggacccttgcgccttttccaaggcagccctgggtttgcgcagggacgcggctgctctgggcgtggttccgggaaacgcagcggcgccgaccctgggtctcgcacattcttcacgtccgttcgcagcgtcacccggatcttcgccgctacccttgtgggccccccggcgacgcttcctgctccgcccctaagtcgggaaggttccttgcggttcgcggcgtgccggacgtgacaaacggaagccgcacgtctcactagtaccctcgcagacggacagcgccagggagcaatggcagcgcgccgaccgcgatgggctgtggccaatagcggctgctcagcagggcgcgccgagagcagcggccgggaaggggcggtgcgggaggcggggtgtggggcggtagtgtgggccctgttcctgcccgcgcggtgttccgcattctgcaagcctccggagcgcacgtcggcagtcggctccctcgttgaccgaatcaccgacctctctccccagggggtacccagctgtctagagaattctagatcttgagacaaatggcagtattcatccacaattttaaaagaaaaggggggattggggggtacagtgcaggggaaagaatagtagacataatagcaacagacatacaaactaaagaattacaaaaacaaattacaaaaattcaaaattttcgggtttattacagggacagcagagatccactttggcgccggctcgaggggg

SEQ ID NO: 75 - protein, 187 aa, Artificial Sequence
  Synthetic Polypeptide
MVSKGEAVIKEFMRFKVHMEGSMNGHEFEIEGEGEGRPYEGTQTAKLKCLSYETEILTVEYGLLPIGKIVEKRIECTVYSVDNNGNIYTQPVAQWHDRGEQEVFEYCLEDGSLIRATKDHKFMTVDGQMLPIDEIFERELDLMRVDNLPNGGGGSGSAQLEKELQALEKKLAQLEWENQALEKELAQ

SEQ ID NO: 76 - DNA, 9438 bp, Artificial Sequence
  Synthetic Polynucleotide
cccggggttattaatagtaatcaattacggggtcattagttcatagcccatatatggagttccgcgttacataacttacggtaaatggcccgcctggctgaccgcccaacgacccccgcccattgacgtcaataatgacgtatgttcccatagtaacgccaatagggactttccattgacgtcaatgggtggagtatttacggtaaactgcccacttggcagtacatcaagtgtatcatatgccaagtacgccccctattgacgtcaatgacggtaaatggcccgcctggcattatgcccagtacatgaccttatgggactttcctacttggcagtacatctacgtattagtcatcgctattaccatggtgatgcggttttggcagtacatcaatgggcgtggatagcggtttgactcacggggatttccaagtctccaccccattgacgtcaatgggagtttgttttggcaccaaaatcaacgggactttccaaaatgtcgtaacaactccgccccattgacgcaaatgggcggtaggcgtgtacggtgggaggtctatataagcagagctctctggctaactgtcgggatcaacaagtttgtacaaaaaagcaggctccgaattcaccggtgccgccaccatggctcaactgaagaagaaactccaggccaataagaaagaactggcacagctgaagtggaagctgcaggcactgaaaaagaagctggcacagggcggaggaggctcaggcagtatgattaagatcgctacgcggaagtacctggggaaacagaacgtctacgacataggtgtggagcgcgatcacaactttgctctgaaaaatggatttatcgccagcaactgcgtgaccaagggtggccccctgcccttctcctgggacatcctgtcccctcagttcatgtacggctccagggccttcaccaagcaccccgccgacatccccgactactataagcagtccttccccgagggcttcaagtgggagcgcgtgatgaacttcgaggacggcggcgccgtgaccgtgacccaggacacctccctggaggacggcaccctgatctacaaggtgaagctccgcggcaccaacttccctcctgacggccccgtaatgcagaagaagacaatgggctgggaagcgtccaccgagcggttgtaccccgaggacggcgtgctgaagggcgacattaagatggccctgcgcctgaaggacggcggccgctacctggcggacttcaagaccacctacaaggccaagaagcccgtgcagatgcccggcgcctacaacgtcgaccgcaagttggacatcacctcccacaacgaggactacaccgtggtggaacagtacgaacgctccgagggccgccactccaccggcggcatggacgagctgtacaagtgattaattaagaattcgacccagctttcttgtacaaagtggttggtaagcctatccctaaccctctcctcggtctcgattctacgtagtaatgagctagcagtctcgaggttaacgaattccgccccccccctaacgttactggccgaagccgcttggaataaggccggtgtgcgcttgtctatatgttattttccaccatattgccgtcttttggcaatgtgagggcccggaaacctggccctgtcttcttgacgagcattcctaggggtctttcccctctcgccaaaggaatgcaaggtctgttgaatgtcgtgaaggaagcagttcctctggaagcttcttgaagacaaacaacgtctgtagcgaccctttgcaggcagcggaaccccccacctggcgacaggtgcccctgcggccaaaagccacgtgtataagatacacctgcaaaggcggcacaaccccagtgccacgttgtgagttggatagttgtggaaagagtcaaatggctctcctcaagcgtattcaacaaggggctgaaggatgcccagaaggtaccccattgtatgggatctgatctggggcctcggtgcacatgctttacatgtgtttagtcgaggttaaaaaaacgtctaggccccccgaaccacggggacgtggttttcctttgaaaaacacgataataccatggtgagcaagggcgaggagctgttcaccggggtggtgcccatcctggtcgagctggacggcgacgtaaacggccacaagttcagcgtgtccggcgagggcgagggcgatgccacctacggcaagctgaccctgaagttcatctgcaccaccggcaagctgcccgtgccctggcccaccctcgtgaccaccctgacctacggcgtgcagtgcttcagccgctaccccgaccacatgaagcagcacgacttcttcaagtccgccatgcccgaaggctacgtccaggagcgcaccatcttcttcaaggacgacggcaactacaagacccgcgccgaggtgaagttcgagggcgacaccctggtgaaccgcatcgagctgaagggcatcgacttcaaggaggacggcaacatcctggggcacaagctggagtacaactacaacagccacaacgtctatatcatggccgacaagcagaagaacggcatcaaggtgaacttcaagatccgccacaacatcgaggacggcagcgtgcagctcgccgaccactaccagcagaacacccccatcggcgacggccccgtgctgctgcccgacaaccactacctgagcacccagtccgccctgagcaaagaccccaacgagaagcgcgatcacatggtcctgctggagttcgtgaccgccgccgggatcactctcggcatggacgagctgtacaagtaacaccggtggcgcgttaagtcgacaatcaacctctggattacaaaatttgtgaaagattgactggtattcttaactatgttgctccttttacgctatgtggatacgctgctttaatgcctttgtatcatgctattgcttcccgtatggctttcattttctcctccttgtataaatcctggttgctgtctctttatgaggagttgtggcccgttgtcaggcaacgtggcgtggtgtgcactgtgtttgctgacgcaacccccactggttggggcattgccaccacctgtcagctcctttccgggactttcgctttccccctccctattgccacggcggaactcatcgccgcctgccttgcccgctgctggacaggggctcggctgttgggcactgacaattccgtggtgttgtcggggaaatcatcgtcctttccttggctgctcgcctgtgttgccacctggattctgcgcgggacgtccttctgctacgtcccttcggccctcaatccagcggaccttccttcccgcggcctgctgccggctctgcggcctcttccgcgtcttcgccttcgccctcagacgagtcggatctccctttgggccgcctccccgcgtcgactttaagaccaatgacttacaaggcagctgtagatcttagccactttttaaaagaaaaggggggactggaagggctaattcactcccaacgaagacaagatctgctttttgcttgtactgggtctctctggttagaccagatctgagcctgggagctctctggctaactagggaacccactgcttaagcctcaataaagcttgccttgagtgcttcaagtagtgtgtgcccgtctgttgtgtgactctggtaactagagatccctcagacccttttagtcagtgtggaaaatctctagcagtacgtatagtagttcatgtcatcttattattcagtatttataacttgcaaagaaatgaatatcagagagtgagaggaacttgtttattgcagcttataatggttacaaataaagcaatagcatcacaaatttcacaaataaagcatttttttcactgcattctagttgtggtttgtccaaactcatcaatgtatcttatcatgtctggctctagctatcccgcccctaactccgcccatcccgcccctaactccgcccagttccgcccattctccgccccatggctgactaattttttttatttatgcagaggccgaggccgcctcggcctctgagctattccagaagtagtgaggaggcttttttggaggcctagggacgtacccaattcgccctatagtgagtcgtattacgcgcgctcactggccgtcgttttacaacgtcgtgactgggaaaaccctggcgttacccaacttaatcgccttgcagcacatccccctttcgccagctggcgtaatagcgaagaggcccgcaccgatcgcccttcccaacagttgcgcagcctgaatggcgaatgggacgcgccctgtagcggcgcattaagcgcggcgggtgtggtggttacgcgcagcgtgaccgctacacttgccagcgccctagcgcccgctcctttcgctttcttcccttcctttctcgccacgttcgccggctttccccgtcaagctctaaatcgggggctccctttagggttccgatttagtgctttacggcacctcgaccccaaaaaacttgattagggtgatggttcacgtagtgggccatcgccctgatagacggtttttcgccctttgacgttggagtccacgttctttaatagtggactcttgttccaaactggaacaacactcaaccctatctcggtctattcttttgatttataagggattttgccgatttcggcctattggttaaaaaatgagctgatttaacaaaaatttaacgcgaattttaacaaaatattaacgcttacaatttaggtggcacttttcggggaaatgtgcgcggaacccctatttgtttatttttctaaatacattcaaatatgtatccgctcatgagacaataaccctgataaatgcttcaataatattgaaaaaggaagagtatgagtattcaacatttccgtgtcgcccttattcccttttttgcggcattttgccttcctgtttttgctcacccagaaacgctggtgaaagtaaaagatgctgaagatcagttgggtgcacgagtgggttacatcgaactggatctcaacagcggtaagatccttgagagttttcgccccgaagaacgttttccaatgatgagcacttttaaagttctgctatgtggcgcggtattatcccgtattgacgccgggcaagagcaactcggtcgccgcatacactattctcagaatgacttggttgagtactcaccagtcacagaaaagcatcttacggatggcatgacagtaagagaattatgcagtgctgccataaccatgagtgataacactgcggccaacttacttctgacaacgatcggaggaccgaaggagctaaccgcttttttgcacaacatgggggatcatgtaactcgccttgatcgttgggaaccggagctgaatgaagccataccaaacgacgagcgtgacaccacgatgcctgtagcaatggcaacaacgttgcgcaaactattaactggcgaactacttactctagcttcccggcaacaattaatagactggatggaggcggataaagttgcaggaccacttctgcgctcggcccttccggctggctggtttattgctgataaatctggagccggtgagcgtgggtctcgcggtatcattgcagcactggggccagatggtaagccctcccgtatcgtagttatctacacgacggggagtcaggcaactatggatgaacgaaatagacagatcgctgagataggtgcctcactgattaagcattggtaactgtcagaccaagtttactcatatatactttagattgatttaaaacttcatttttaatttaaaaggatctaggtgaagatcctttttgataatctcatgaccaaaatcccttaacgtgagttttcgttccactgagcgtcagaccccgtagaaaagatcaaaggatcttcttgagatcctttttttctgcgcgtaatctgctgcttgcaaacaaaaaaaccaccgctaccagcggtggtttgtttgccggatcaagagctaccaactctttttccgaaggtaactggcttcagcagagcgcagataccaaatactgttcttctagtgtagccgtagttaggccaccacttcaagaactctgtagcaccgcctacatacctcgctctgctaatcctgttaccagtggctgctgccagtggcgataagtcgtgtcttaccgggttggactcaagacgatagttaccggataaggcgcagcggtcgggctgaacggggggttcgtgcacacagcccagcttggagcgaacgacctacaccgaactgagatacctacagcgtgagctatgagaaagcgccacgcttcccgaagggagaaaggcggacaggtatccggtaagcggcagggtcggaacaggagagcgcacgagggagcttccagggggaaacgcctggtatctttatagtcctgtcgggtttcgccacctctgacttgagcgtcgatttttgtgatgctcgtcaggggggcggagcctatggaaaaacgccagcaacgcggcctttttacggttcctggccttttgctggccttttgctcacatgttctttcctgcgttatcccctgattctgtggataaccgtattaccgcctttgagtgagctgataccgctcgccgcagccgaacgaccgagcgcagcgagtcagtgagcgaggaagcggaagagcgcccaatacgcaaaccgcctctccccgcgcgttggccgattcattaatgcagctggcacgacaggtttcccgactggaaagcgggcagtgagcgcaacgcaattaatgtgagttagctcactcattaggcaccccaggctttacactttatgcttccggctcgtatgttgtgtggaattgtgagcggataacaatttcacacaggaaacagctatgaccatgattacgccaagcgcgcaattaaccctcactaaagggaacaaaagctggagctgcaagcttaatgtagtcttatgcaatactcttgtagtcttgcaacatggtaacgatgagttagcaacatgccttacaaggagagaaaaagcaccgtgcatgccgattggtggaagtaaggtggtacgatcgtgccttattaggaaggcaacagacgggtctgacatggattggacgaaccactgaattgccgcattgcagagatattgtatttaagtgcctagctcgatacataaacgggtctctctggttagaccagatctgagcctgggagctctctggctaactagggaacccactgcttaagcctcaataaagcttgccttgagtgcttcaagtagtgtgtgcccgtctgttgtgtgactctggtaactagagatccctcagacccttttagtcagtgtggaaaatctctagcagtggcgcccgaacagggacttgaaagcgaaagggaaaccagaggagctctctcgacgcaggactcggcttgctgaagcgcgcacggcaagaggcgaggggcggcgactggtgagtacgccaaaaattttgactagcggaggctagaaggagagagatgggtgcgagagcgtcagtattaagcgggggagaattagatcgcgatgggaaaaaattcggttaaggccagggggaaagaaaaaatataaattaaaacatatagtatgggcaagcagggagctagaacgattcgcagttaatcctggcctgttagaaacatcagaaggctgtagacaaatactgggacagctacaaccatcccttcagacaggatcagaagaacttagatcattatataatacagtagcaaccctctattgtgtgcatcaaaggatagagataaaagacaccaaggaagctttagacaagatagaggaagagcaaaacaaaagtaagaccaccgcacagcaagcggccgctgatcttcagacctggaggaggagatatgagggacaattggagaagtgaattatataaatataaagtagtaaaaattgaaccattaggagtagcacccaccaaggcaaagagaagagtggtgcagagagaaaaaagagcagtgggaataggagctttgttccttgggttcttgggagcagcaggaagcactatgggcgcagcgtcaatgacgctgacggtacaggccagacaattattgtctggtatagtgcagcagcagaacaatttgctgagggctattgaggcgcaacagcatctgttgcaactcacagtctggggcatcaagcagctccaggcaagaatcctggctgtggaaagatacctaaaggatcaacagctcctggggatttggggttgctctggaaaactcatttgcaccactgctgtgccttggaatgctagttggagtaataaatctctggaacagatttggaatcacacgacctggatggagtgggacagagaaattaacaattacacaagcttaatacactccttaattgaagaatcgcaaaaccagcaagaaaagaatgaacaagaattattggaattagataaatgggcaagtttgtggaattggtttaacataacaaattggctgtggtatataaaattattcataatgatagtaggaggcttggtaggtttaagaatagtttttgctgtactttctatagtgaatagagttaggcagggatattcaccattatcgtttcagacccacctcccaaccccgaggggacccttgcgccttttccaaggcagccctgggtttgcgcagggacgcggctgctctgggcgtggttccgggaaacgcagcggcgccgaccctgggtctcgcacattcttcacgtccgttcgcagcgtcacccggatcttcgccgctacccttgtgggccccccggcgacgcttcctgctccgcccctaagtcgggaaggttccttgcggttcgcggcgtgccggacgtgacaaacggaagccgcacgtctcactagtaccctcgcagacggacagcgccagggagcaatggcagcgcgccgaccgcgatgggctgtggccaatagcggctgctcagcagggcgcgccgagagcagcggccgggaaggggcggtgcgggaggcggggtgtggggcggtagtgtgggccctgttcctgcccgcgcggtgttccgcattctgcaagcctccggagcgcacgtcggcagtcggctccctcgttgaccgaatcaccgacctctctccccagggggtacccagctgtctagagaattctagatcttgagacaaatggcagtattcatccacaattttaaaagaaaaggggggattggggggtacagtgcaggggaaagaatagtagacataatagcaacagacatacaaactaaagaattacaaaaacaaattacaaaaattcaaaattttcgggtttattacagggacagcagagatccactttggcgccggctcgaggggg

SEQ ID NO: 77 - protein, 259 aa, Artificial Sequence
  Synthetic Polypeptide
MAQLKKKLQANKKELAQLKWKLQALKKKLAQGGGGSGSMIKIATRKYLGKQNVYDIGVERDHNFALKNGFIASNCVTKGGPLPFSWDILSPQFMYGSRAFTKHPADIPDYYKQSFPEGFKWERVMNFEDGGAVTVTQDTSLEDGTLIYKVKLRGTNFPPDGPVMQKKTMGWEASTERLYPEDGVLKGDIKMALRLKDGGRYLADFKTTYKAKKPVQMPGAYNVDRKLDITSHNEDYTVVEQYERSEGRHSTGGMDELYK

SEQ ID NO: 78 - DNA, 9219 bp, Artificial Sequence
  Synthetic Polynucleotide
cccggggttattaatagtaatcaattacggggtcattagttcatagcccatatatggagttccgcgttacataacttacggtaaatggcccgcctggctgaccgcccaacgacccccgcccattgacgtcaataatgacgtatgttcccatagtaacgccaatagggactttccattgacgtcaatgggtggagtatttacggtaaactgcccacttggcagtacatcaagtgtatcatatgccaagtacgccccctattgacgtcaatgacggtaaatggcccgcctggcattatgcccagtacatgaccttatgggactttcctacttggcagtacatctacgtattagtcatcgctattaccatggtgatgcggttttggcagtacatcaatgggcgtggatagcggtttgactcacggggatttccaagtctccaccccattgacgtcaatgggagtttgttttggcaccaaaatcaacgggactttccaaaatgtcgtaacaactccgccccattgacgcaaatgggcggtaggcgtgtacggtgggaggtctatataagcagagctctctggctaactgtcgggatcaacaagtttgtacaaaaaagcaggctccgaattcaccggtgccgccaccatggtgagcaagggcgaggcagtgatcaaggagttcatgcggttcaaggtgcacatggagggctccatgaacggccacgagttcgagatcgagggcgagggcgagggccgcccctacgagggcacccagaccgccaagctgaaggtgaccaagtgcctttcatacgagaccgagatcctgactgtcgagtacggattgcttcctatcggcaaaatcgtggagaagaggattgaatgtaccgtctattcagtcgataataatgggaacatctacacacagcccgtggctcaatggcacgacagaggagagcaggaagtttttgaatactgtctcgaggacggatccctcatccgcgctactaaagatcataagtttatgaccgtggacggccagatgctgccaattgacgaaatttttgaacgagagctggatctgatgagagtcgacaaccttccaaacggtggaggggggtcaggctctgcgcagctggaaaaggagcttcaagccctcgaaaaaaagttggcccagctcgagtgggagaaccaggctctggagaaagaactggcccagtgattaattaagaattcgacccagctttcttgtacaaagtggttggtaagcctatccctaaccctctcctcggtctcgattctacgtagtaatgagctagcagtctcgaggttaacgaattccgccccccccctaacgttactggccgaagccgcttggaataaggccggtgtgcgcttgtctatatgttattttccaccatattgccgtcttttggcaatgtgagggcccggaaacctggccctgtcttcttgacgagcattcctaggggtctttcccctctcgccaaaggaatgcaaggtctgttgaatgtcgtgaaggaagcagttcctctggaagcttcttgaagacaaacaacgtctgtagcgaccctttgcaggcagcggaaccccccacctggcgacaggtgcccctgcggccaaaagccacgtgtataagatacacctgcaaaggcggcacaaccccagtgccacgttgtgagttggatagttgtggaaagagtcaaatggctctcctcaagcgtattcaacaaggggctgaaggatgcccagaaggtaccccattgtatgggatctgatctggggcctcggtgcacatgctttacatgtgtttagtcgaggttaaaaaaacgtctaggccccccgaaccacggggacgtggttttcctttgaaaaacacgataataccatggccatgagcgagctgattaaggagaacatgcacatgaagctgtacatggagggcaccgtggacaaccatcacttcaagtgcacatccgagggcgaaggcaagccctacgagggcacccagaccatgagaatcaaggtggtcgagggcggccctctccccttcgccttcgacatcctggctactagcttcctctacggcagcaagaccttcatcaaccacacccagggcatccccgacttcttcaagcagtccttccctgagggcttcacatgggagagagtcaccacatacgaagacgggggcgtgctgaccgctacccaggacaccagcctccaggacggctgcctcatctacaacgtcaagatcagaggggtgaacttcacatccaacggccctgtgatgcagaagaaaacactcggctgggaggccttcaccgagacgctgtaccccgctgacggcggcctggaaggcagaaacgacatggccctgaagctcgtgggcgggagccatctgatcgcaaacatcaagaccacatatagatccaagaaacccgctaagaacctcaagatgcctggcgtctactatgtggactacagactggaaagaatcaaggaggccaacaacgagacctacgtcgagcagcacgaggtggcagtggccagatactgcgacctccctagcaaactggggcacaagcttaattaacaccggtggcgcgttaagtcgacaatcaacctctggattacaaaatttgtgaaagattgactggtattcttaactatgttgctccttttacgctatgtggatacgctgctttaatgcctttgtatcatgctattgcttcccgtatggctttcattttctcctccttgtataaatcctggttgctgtctctttatgaggagttgtggcccgttgtcaggcaacgtggcgtggtgtgcactgtgtttgctgacgcaacccccactggttggggcattgccaccacctgtcagctcctttccgggactttcgctttccccctccctattgccacggcggaactcatcgccgcctgccttgcccgctgctggacaggggctcggctgttgggcactgacaattccgtggtgttgtcggggaaatcatcgtcctttccttggctgctcgcctgtgttgccacctggattctgcgcgggacgtccttctgctacgtcccttcggccctcaatccagcggaccttccttcccgcggcctgctgccggctctgcggcctcttccgcgtcttcgccttcgccctcagacgagtcggatctccctttgggccgcctccccgcgtcgactttaagaccaatgacttacaaggcagctgtagatcttagccactttttaaaagaaaaggggggactggaagggctaattcactcccaacgaagacaagatctgctttttgcttgtactgggtctctctggttagaccagatctgagcctgggagctctctggctaactagggaacccactgcttaagcctcaataaagcttgccttgagtgcttcaagtagtgtgtgcccgtctgttgtgtgactctggtaactagagatccctcagacccttttagtcagtgtggaaaatctctagcagtacgtatagtagttcatgtcatcttattattcagtatttataacttgcaaagaaatgaatatcagagagtgagaggaacttgtttattgcagcttataatggttacaaataaagcaatagcatcacaaatttcacaaataaagcatttttttcactgcattctagttgtggtttgtccaaactcatcaatgtatcttatcatgtctggctctagctatcccgcccctaactccgcccatcccgcccctaactccgcccagttccgcccattctccgccccatggctgactaattttttttatttatgcagaggccgaggccgcctcggcctctgagctattccagaagtagtgaggaggcttttttggaggcctagggacgtacccaattcgccctatagtgagtcgtattacgcgcgctcactggccgtcgttttacaacgtcgtgactgggaaaaccctggcgttacccaacttaatcgccttgcagcacatccccctttcgccagctggcgtaatagcgaagaggcccgcaccgatcgcccttcccaacagttgcgcagcctgaatggcgaatgggacgcgccctgtagcggcgcattaagcgcggcgggtgtggtggttacgcgcagcgtgaccgctacacttgccagcgccctagcgcccgctcctttcgctttcttcccttcctttctcgccacgttcgccggctttccccgtcaagctctaaatcgggggctccctttagggttccgatttagtgctttacggcacctcgaccccaaaaaacttgattagggtgatggttcacgtagtgggccatcgccctgatagacggtttttcgccctttgacgttggagtccacgttctttaatagtggactcttgttccaaactggaacaacactcaaccctatctcggtctattcttttgatttataagggattttgccgatttcggcctattggttaaaaaatgagctgatttaacaaaaatttaacgcgaattttaacaaaatattaacgcttacaatttaggtggcacttttcggggaaatgtgcgcggaacccctatttgtttatttttctaaatacattcaaatatgtatccgctcatgagacaataaccctgataaatgcttcaataatattgaaaaaggaagagtatgagtattcaacatttccgtgtcgcccttattcccttttttgcggcattttgccttcctgtttttgctcacccagaaacgctggtgaaagtaaaagatgctgaagatcagttgggtgcacgagtgggttacatcgaactggatctcaacagcggtaagatccttgagagttttcgccccgaagaacgttttccaatgatgagcacttttaaagttctgctatgtggcgcggtattatcccgtattgacgccgggcaagagcaactcggtcgccgcatacactattctcagaatgacttggttgagtactcaccagtcacagaaaagcatcttacggatggcatgacagtaagagaattatgcagtgctgccataaccatgagtgataacactgcggccaacttacttctgacaacgatcggaggaccgaaggagctaaccgcttttttgcacaacatgggggatcatgtaactcgccttgatcgttgggaaccggagctgaatgaagccataccaaacgacgagcgtgacaccacgatgcctgtagcaatggcaacaacgttgcgcaaactattaactggcgaactacttactctagcttcccggcaacaattaatagactggatggaggcggataaagttgcaggaccacttctgcgctcggcccttccggctggctggtttattgctgataaatctggagccggtgagcgtgggtctcgcggtatcattgcagcactggggccagatggtaagccctcccgtatcgtagttatctacacgacggggagtcaggcaactatggatgaacgaaatagacagatcgctgagataggtgcctcactgattaagcattggtaactgtcagaccaagtttactcatatatactttagattgatttaaaacttcatttttaatttaaaaggatctaggtgaagatcctttttgataatctcatgaccaaaatcccttaacgtgagttttcgttccactgagcgtcagaccccgtagaaaagatcaaaggatcttcttgagatcctttttttctgcgcgtaatctgctgcttgcaaacaaaaaaaccaccgctaccagcggtggtttgtttgccggatcaagagctaccaactctttttccgaaggtaactggcttcagcagagcgcagataccaaatactgttcttctagtgtagccgtagttaggccaccacttcaagaactctgtagcaccgcctacatacctcgctctgctaatcctgttaccagtggctgctgccagtggcgataagtcgtgtcttaccgggttggactcaagacgatagttaccggataaggcgcagcggtcgggctgaacggggggttcgtgcacacagcccagcttggagcgaacgacctacaccgaactgagatacctacagcgtgagctatgagaaagcgccacgcttcccgaagggagaaaggcggacaggtatccggtaagcggcagggtcggaacaggagagcgcacgagggagcttccagggggaaacgcctggtatctttatagtcctgtcgggtttcgccacctctgacttgagcgtcgatttttgtgatgctcgtcaggggggcggagcctatggaaaaacgccagcaacgcggcctttttacggttcctggccttttgctggccttttgctcacatgttctttcctgcgttatcccctgattctgtggataaccgtattaccgcctttgagtgagctgataccgctcgccgcagccgaacgaccgagcgcagcgagtcagtgagcgaggaagcggaagagcgcccaatacgcaaaccgcctctccccgcgcgttggccgattcattaatgcagctggcacgacaggtttcccgactggaaagcgggcagtgagcgcaacgcaattaatgtgagttagctcactcattaggcaccccaggctttacactttatgcttccggctcgtatgttgtgtggaattgtgagcggataacaatttcacacaggaaacagctatgaccatgattacgccaagcgcgcaattaaccctcactaaagggaacaaaagctggagctgcaagcttaatgtagtcttatgcaatactcttgtagtcttgcaacatggtaacgatgagttagcaacatgccttacaaggagagaaaaagcaccgtgcatgccgattggtggaagtaaggtggtacgatcgtgccttattaggaaggcaacagacgggtctgacatggattggacgaaccactgaattgccgcattgcagagatattgtatttaagtgcctagctcgatacataaacgggtctctctggttagaccagatctgagcctgggagctctctggctaactagggaacccactgcttaagcctcaataaagcttgccttgagtgcttcaagtagtgtgtgcccgtctgttgtgtgactctggtaactagagatccctcagacccttttagtcagtgtggaaaatctctagcagtggcgcccgaacagggacttgaaagcgaaagggaaaccagaggagctctctcgacgcaggactcggcttgctgaagcgcgcacggcaagaggcgaggggcggcgactggtgagtacgccaaaaattttgactagcggaggctagaaggagagagatgggtgcgagagcgtcagtattaagcgggggagaattagatcgcgatgggaaaaaattcggttaaggccagggggaaagaaaaaatataaattaaaacatatagtatgggcaagcagggagctagaacgattcgcagttaatcctggcctgttagaaacatcagaaggctgtagacaaatactgggacagctacaaccatcccttcagacaggatcagaagaacttagatcattatataatacagtagcaaccctctattgtgtgcatcaaaggatagagataaaagacaccaaggaagctttagacaagatagaggaagagcaaaacaaaagtaagaccaccgcacagcaagcggccgctgatcttcagacctggaggaggagatatgagggacaattggagaagtgaattatataaatataaagtagtaaaaattgaaccattaggagtagcacccaccaaggcaaagagaagagtggtgcagagagaaaaaagagcagtgggaataggagctttgttccttgggttcttgggagcagcaggaagcactatgggcgcagcgtcaatgacgctgacggtacaggccagacaattattgtctggtatagtgcagcagcagaacaatttgctgagggctattgaggcgcaacagcatctgttgcaactcacagtctggggcatcaagcagctccaggcaagaatcctggctgtggaaagatacctaaaggatcaacagctcctggggatttggggttgctctggaaaactcatttgcaccactgctgtgccttggaatgctagttggagtaataaatctctggaacagatttggaatcacacgacctggatggagtgggacagagaaattaacaattacacaagcttaatacactccttaattgaagaatcgcaaaaccagcaagaaaagaatgaacaagaattattggaattagataaatgggcaagtttgtggaattggtttaacataacaaattggctgtggtatataaaattattcataatgatagtaggaggcttggtaggtttaagaatagtttttgctgtactttctatagtgaatagagttaggcagggatattcaccattatcgtttcagacccacctcccaaccccgaggggacccttgcgccttttccaaggcagccctgggtttgcgcagggacgcggctgctctgggcgtggttccgggaaacgcagcggcgccgaccctgggtctcgcacattcttcacgtccgttcgcagcgtcacccggatcttcgccgctacccttgtgggccccccggcgacgcttcctgctccgcccctaagtcgggaaggttccttgcggttcgcggcgtgccggacgtgacaaacggaagccgcacgtctcactagtaccctcgcagacggacagcgccagggagcaatggcagcgcgccgaccgcgatgggctgtggccaatagcggctgctcagcagggcgcgccgagagcagcggccgggaaggggcggtgcgggaggcggggtgtggggcggtagtgtgggccctgttcctgcccgcgcggtgttccgcattctgcaagcctccggagcgcacgtcggcagtcggctccctcgttgaccgaatcaccgacctctctccccagggggtacccagctgtctagagaattctagatcttgagacaaatggcagtattcatccacaattttaaaagaaaaggggggattggggggtacagtgcaggggaaagaatagtagacataatagcaacagacatacaaactaaagaattacaaaaacaaattacaaaaattcaaaattttcgggtttattacagggacagcagagatccactttggcgccggctcgaggggg

SEQ ID NO: 79 - protein, 190 aa, Artificial Sequence
  Synthetic Polypeptide
MVSKGEAVIKEFMRFKVHMEGSMNGHEFEIEGEGEGRPYEGTQTAKLKVTKCLSYETEILTVEYGLLPIGKIVEKRIECTVYSVDNNGNIYTQPVAQWHDRGEQEVFEYCLEDGSLIRATKDHKFMTVDGQMLPIDEIFERELDLMRVDNLPNGGGGSGSAQLEKELQALEKKLAQLEWENQALEKELAQ

SEQ ID NO: 80 - DNA, 9429 bp, Artificial Sequence
  Synthetic Polynucleotide
cccggggttattaatagtaatcaattacggggtcattagttcatagcccatatatggagttccgcgttacataacttacggtaaatggcccgcctggctgaccgcccaacgacccccgcccattgacgtcaataatgacgtatgttcccatagtaacgccaatagggactttccattgacgtcaatgggtggagtatttacggtaaactgcccacttggcagtacatcaagtgtatcatatgccaagtacgccccctattgacgtcaatgacggtaaatggcccgcctggcattatgcccagtacatgaccttatgggactttcctacttggcagtacatctacgtattagtcatcgctattaccatggtgatgcggttttggcagtacatcaatgggcgtggatagcggtttgactcacggggatttccaagtctccaccccattgacgtcaatgggagtttgttttggcaccaaaatcaacgggactttccaaaatgtcgtaacaactccgccccattgacgcaaatgggcggtaggcgtgtacggtgggaggtctatataagcagagctctctggctaactgtcgggatcaacaagtttgtacaaaaaagcaggctccgaattcaccggtgccgccaccatggctcaactgaagaagaaactccaggccaataagaaagaactggcacagctgaagtggaagctgcaggcactgaaaaagaagctggcacagggcggaggaggctcaggcagtatgattaagatcgctacgcggaagtacctggggaaacagaacgtctacgacataggtgtggagcgcgatcacaactttgctctgaaaaatggatttatcgccagcaactgcggtggccccctgcccttctcctgggacatcctgtcccctcagttcatgtacggctccagggccttcaccaagcaccccgccgacatccccgactactataagcagtccttccccgagggcttcaagtgggagcgcgtgatgaacttcgaggacggcggcgccgtgaccgtgacccaggacacctccctggaggacggcaccctgatctacaaggtgaagctccgcggcaccaacttccctcctgacggccccgtaatgcagaagaagacaatgggctgggaagcgtccaccgagcggttgtaccccgaggacggcgtgctgaagggcgacattaagatggccctgcgcctgaaggacggcggccgctacctggcggacttcaagaccacctacaaggccaagaagcccgtgcagatgcccggcgcctacaacgtcgaccgcaagttggacatcacctcccacaacgaggactacaccgtggtggaacagtacgaacgctccgagggccgccactccaccggcggcatggacgagctgtacaagtgattaattaagaattcgacccagctttcttgtacaaagtggttggtaagcctatccctaaccctctcctcggtctcgattctacgtagtaatgagctagcagtctcgaggttaacgaattccgccccccccctaacgttactggccgaagccgcttggaataaggccggtgtgcgcttgtctatatgttattttccaccatattgccgtcttttggcaatgtgagggcccggaaacctggccctgtcttcttgacgagcattcctaggggtctttcccctctcgccaaaggaatgcaaggtctgttgaatgtcgtgaaggaagcagttcctctggaagcttcttgaagacaaacaacgtctgtagcgaccctttgcaggcagcggaaccccccacctggcgacaggtgcccctgcggccaaaagccacgtgtataagatacacctgcaaaggcggcacaaccccagtgccacgttgtgagttggatagttgtggaaagagtcaaatggctctcctcaagcgtattcaacaaggggctgaaggatgcccagaaggtaccccattgtatgggatctgatctggggcctcggtgcacatgctttacatgtgtttagtcgaggttaaaaaaacgtctaggccccccgaaccacggggacgtggttttcctttgaaaaacacgataataccatggtgagcaagggcgaggagctgttcaccggggtggtgcccatcctggtcgagctggacggcgacgtaaacggccacaagttcagcgtgtccggcgagggcgagggcgatgccacctacggcaagctgaccctgaagttcatctgcaccaccggcaagctgcccgtgccctggcccaccctcgtgaccaccctgacctacggcgtgcagtgcttcagccgctaccccgaccacatgaagcagcacgacttcttcaagtccgccatgcccgaaggctacgtccaggagcgcaccatcttcttcaaggacgacggcaactacaagacccgcgccgaggtgaagttcgagggcgacaccctggtgaaccgcatcgagctgaagggcatcgacttcaaggaggacggcaacatcctggggcacaagctggagtacaactacaacagccacaacgtctatatcatggccgacaagcagaagaacggcatcaaggtgaacttcaagatccgccacaacatcgaggacggcagcgtgcagctcgccgaccactaccagcagaacacccccatcggcgacggccccgtgctgctgcccgacaaccactacctgagcacccagtccgccctgagcaaagaccccaacgagaagcgcgatcacatggtcctgctggagttcgtgaccgccgccgggatcactctcggcatggacgagctgtacaagtaacaccggtggcgcgttaagtcgacaatcaacctctggattacaaaatttgtgaaagattgactggtattcttaactatgttgctccttttacgctatgtggatacgctgctttaatgcctttgtatcatgctattgcttcccgtatggctttcattttctcctccttgtataaatcctggttgctgtctctttatgaggagttgtggcccgttgtcaggcaacgtggcgtggtgtgcactgtgtttgctgacgcaacccccactggttggggcattgccaccacctgtcagctcctttccgggactttcgctttccccctccctattgccacggcggaactcatcgccgcctgccttgcccgctgctggacaggggctcggctgttgggcactgacaattccgtggtgttgtcggggaaatcatcgtcctttccttggctgctcgcctgtgttgccacctggattctgcgcgggacgtccttctgctacgtcccttcggccctcaatccagcggaccttccttcccgcggcctgctgccggctctgcggcctcttccgcgtcttcgccttcgccctcagacgagtcggatctccctttgggccgcctccccgcgtcgactttaagaccaatgacttacaaggcagctgtagatcttagccactttttaaaagaaaaggggggactggaagggctaattcactcccaacgaagacaagatctgctttttgcttgtactgggtctctctggttagaccagatctgagcctgggagctctctggctaactagggaacccactgcttaagcctcaataaagcttgccttgagtgcttcaagtagtgtgtgcccgtctgttgtgtgactctggtaactagagatccctcagacccttttagtcagtgtggaaaatctctagcagtacgtatagtagttcatgtcatcttattattcagtatttataacttgcaaagaaatgaatatcagagagtgagaggaacttgtttattgcagcttataatggttacaaataaagcaatagcatcacaaatttcacaaataaagcatttttttcactgcattctagttgtggtttgtccaaactcatcaatgtatcttatcatgtctggctctagctatcccgcccctaactccgcccatcccgcccctaactccgcccagttccgcccattctccgccccatggctgactaattttttttatttatgcagaggccgaggccgcctcggcctctgagctattccagaagtagtgaggaggcttttttggaggcctagggacgtacccaattcgccctatagtgagtcgtattacgcgcgctcactggccgtcgttttacaacgtcgtgactgggaaaaccctggcgttacccaacttaatcgccttgcagcacatccccctttcgccagctggcgtaatagcgaagaggcccgcaccgatcgcccttcccaacagttgcgcagcctgaatggcgaatgggacgcgccctgtagcggcgcattaagcgcggcgggtgtggtggttacgcgcagcgtgaccgctacacttgccagcgccctagcgcccgctcctttcgctttcttcccttcctttctcgccacgttcgccggctttccccgtcaagctctaaatcgggggctccctttagggttccgatttagtgctttacggcacctcgaccccaaaaaacttgattagggtgatggttcacgtagtgggccatcgccctgatagacggtttttcgccctttgacgttggagtccacgttctttaatagtggactcttgttccaaactggaacaacactcaaccctatctcggtctattcttttgatttataagggattttgccgatttcggcctattggttaaaaaatgagctgatttaacaaaaatttaacgcgaattttaacaaaatattaacgcttacaatttaggtggcacttttcggggaaatgtgcgcggaacccctatttgtttatttttctaaatacattcaaatatgtatccgctcatgagacaataaccctgataaatgcttcaataatattgaaaaaggaagagtatgagtattcaacatttccgtgtcgcccttattcccttttttgcggcattttgccttcctgtttttgctcacccagaaacgctggtgaaagtaaaagatgctgaagatcagttgggtgcacgagtgggttacatcgaactggatctcaacagcggtaagatccttgagagttttcgccccgaagaacgttttccaatgatgagcacttttaaagttctgctatgtggcgcggtattatcccgtattgacgccgggcaagagcaactcggtcgccgcatacactattctcagaatgacttggttgagtactcaccagtcacagaaaagcatcttacggatggcatgacagtaagagaattatgcagtgctgccataaccatgagtgataacactgcggccaacttacttctgacaacgatcggaggaccgaaggagctaaccgcttttttgcacaacatgggggatcatgtaactcgccttgatcgttgggaaccggagctgaatgaagccataccaaacgacgagcgtgacaccacgatgcctgtagcaatggcaacaacgttgcgcaaactattaactggcgaactacttactctagcttcccggcaacaattaatagactggatggaggcggataaagttgcaggaccacttctgcgctcggcccttccggctggctggtttattgctgataaatctggagccggtgagcgtgggtctcgcggtatcattgcagcactggggccagatggtaagccctcccgtatcgtagttatctacacgacggggagtcaggcaactatggatgaacgaaatagacagatcgctgagataggtgcctcactgattaagcattggtaactgtcagaccaagtttactcatatatactttagattgatttaaaacttcatttttaatttaaaaggatctaggtgaagatcctttttgataatctcatgaccaaaatcccttaacgtgagttttcgttccactgagcgtcagaccccgtagaaaagatcaaaggatcttcttgagatcctttttttctgcgcgtaatctgctgcttgcaaacaaaaaaaccaccgctaccagcggtggtttgtttgccggatcaagagctaccaactctttttccgaaggtaactggcttcagcagagcgcagataccaaatactgttcttctagtgtagccgtagttaggccaccacttcaagaactctgtagcaccgcctacatacctcgctctgctaatcctgttaccagtggctgctgccagtggcgataagtcgtgtcttaccgggttggactcaagacgatagttaccggataaggcgcagcggtcgggctgaacggggggttcgtgcacacagcccagcttggagcgaacgacctacaccgaactgagatacctacagcgtgagctatgagaaagcgccacgcttcccgaagggagaaaggcggacaggtatccggtaagcggcagggtcggaacaggagagcgcacgagggagcttccagggggaaacgcctggtatctttatagtcctgtcgggtttcgccacctctgacttgagcgtcgatttttgtgatgctcgtcaggggggcggagcctatggaaaaacgccagcaacgcggcctttttacggttcctggccttttgctggccttttgctcacatgttctttcctgcgttatcccctgattctgtggataaccgtattaccgcctttgagtgagctgataccgctcgccgcagccgaacgaccgagcgcagcgagtcagtgagcgaggaagcggaagagcgcccaatacgcaaaccgcctctccccgcgcgttggccgattcattaatgcagctggcacgacaggtttcccgactggaaagcgggcagtgagcgcaacgcaattaatgtgagttagctcactcattaggcaccccaggctttacactttatgcttccggctcgtatgttgtgtggaattgtgagcggataacaatttcacacaggaaacagctatgaccatgattacgccaagcgcgcaattaaccctcactaaagggaacaaaagctggagctgcaagcttaatgtagtcttatgcaatactcttgtagtcttgcaacatggtaacgatgagttagcaacatgccttacaaggagagaaaaagcaccgtgcatgccgattggtggaagtaaggtggtacgatcgtgccttattaggaaggcaacagacgggtctgacatggattggacgaaccactgaattgccgcattgcagagatattgtatttaagtgcctagctcgatacataaacgggtctctctggttagaccagatctgagcctgggagctctctggctaactagggaacccactgcttaagcctcaataaagcttgccttgagtgcttcaagtagtgtgtgcccgtctgttgtgtgactctggtaactagagatccctcagacccttttagtcagtgtggaaaatctctagcagtggcgcccgaacagggacttgaaagcgaaagggaaaccagaggagctctctcgacgcaggactcggcttgctgaagcgcgcacggcaagaggcgaggggcggcgactggtgagtacgccaaaaattttgactagcggaggctagaaggagagagatgggtgcgagagcgtcagtattaagcgggggagaattagatcgcgatgggaaaaaattcggttaaggccagggggaaagaaaaaatataaattaaaacatatagtatgggcaagcagggagctagaacgattcgcagttaatcctggcctgttagaaacatcagaaggctgtagacaaatactgggacagctacaaccatcccttcagacaggatcagaagaacttagatcattatataatacagtagcaaccctctattgtgtgcatcaaaggatagagataaaagacaccaaggaagctttagacaagatagaggaagagcaaaacaaaagtaagaccaccgcacagcaagcggccgctgatcttcagacctggaggaggagatatgagggacaattggagaagtgaattatataaatataaagtagtaaaaattgaaccattaggagtagcacccaccaaggcaaagagaagagtggtgcagagagaaaaaagagcagtgggaataggagctttgttccttgggttcttgggagcagcaggaagcactatgggcgcagcgtcaatgacgctgacggtacaggccagacaattattgtctggtatagtgcagcagcagaacaatttgctgagggctattgaggcgcaacagcatctgttgcaactcacagtctggggcatcaagcagctccaggcaagaatcctggctgtggaaagatacctaaaggatcaacagctcctggggatttggggttgctctggaaaactcatttgcaccactgctgtgccttggaatgctagttggagtaataaatctctggaacagatttggaatcacacgacctggatggagtgggacagagaaattaacaattacacaagcttaatacactccttaattgaagaatcgcaaaaccagcaagaaaagaatgaacaagaattattggaattagataaatgggcaagtttgtggaattggtttaacataacaaattggctgtggtatataaaattattcataatgatagtaggaggcttggtaggtttaagaatagtttttgctgtactttctatagtgaatagagttaggcagggatattcaccattatcgtttcagacccacctcccaaccccgaggggacccttgcgccttttccaaggcagccctgggtttgcgcagggacgcggctgctctgggcgtggttccgggaaacgcagcggcgccgaccctgggtctcgcacattcttcacgtccgttcgcagcgtcacccggatcttcgccgctacccttgtgggccccccggcgacgcttcctgctccgcccctaagtcgggaaggttccttgcggttcgcggcgtgccggacgtgacaaacggaagccgcacgtctcactagtaccctcgcagacggacagcgccagggagcaatggcagcgcgccgaccgcgatgggctgtggccaatagcggctgctcagcagggcgcgccgagagcagcggccgggaaggggcggtgcgggaggcggggtgtggggcggtagtgtgggccctgttcctgcccgcgcggtgttccgcattctgcaagcctccggagcgcacgtcggcagtcggctccctcgttgaccgaatcaccgacctctctccccagggggtacccagctgtctagagaattctagatcttgagacaaatggcagtattcatccacaattttaaaagaaaaggggggattggggggtacagtgcaggggaaagaatagtagacataatagcaacagacatacaaactaaagaattacaaaaacaaattacaaaaattcaaaattttcgggtttattacagggacagcagagatccactttggcgccggctcgaggggg

SEQ ID NO: 81 - protein, 256 aa, Artificial Sequence
  Synthetic Polypeptide
MAQLKKKLQANKKELAQLKWKLQALKKKLAQGGGGSGSMIKIATRKYLGKQNVYDIGVERDHNFALKNGFIASNCGGPLPFSWDILSPQFMYGSRAFTKHPADIPDYYKQSFPEGFKWERVMNFEDGGAVTVTQDTSLEDGTLIYKVKLRGTNFPPDGPVMQKKTMGWEASTERLYPEDGVLKGDIKMALRLKDGGRYLADFKTTYKAKKPVQMPGAYNVDRKLDITSHNEDYTVVEQYERSEGRHSTGGMDELYK

SEQ ID NO: 82 - DNA, 9291 bp, Artificial Sequence
  Synthetic Polynucleotide
cccggggttattaatagtaatcaattacggggtcattagttcatagcccatatatggagttccgcgttacataacttacggtaaatggcccgcctggctgaccgcccaacgacccccgcccattgacgtcaataatgacgtatgttcccatagtaacgccaatagggactttccattgacgtcaatgggtggagtatttacggtaaactgcccacttggcagtacatcaagtgtatcatatgccaagtacgccccctattgacgtcaatgacggtaaatggcccgcctggcattatgcccagtacatgaccttatgggactttcctacttggcagtacatctacgtattagtcatcgctattaccatggtgatgcggttttggcagtacatcaatgggcgtggatagcggtttgactcacggggatttccaagtctccaccccattgacgtcaatgggagtttgttttggcaccaaaatcaacgggactttccaaaatgtcgtaacaactccgccccattgacgcaaatgggcggtaggcgtgtacggtgggaggtctatataagcagagctctctggctaactgtcgggatcaacaagtttgtacaaaaaagcaggctccgaattcaccggtgccgccaccatggtgagcaagggcgaggcagtgatcaaggagttcatgcggttcaaggtgcacatggagggctccatgaacggccacgagttcgagatcgagggcgagggcgagggccgcccctacgagggcacccagaccgccaagctgaaggtgaccaagggtggccccctgcccttctcctgggacatcctgtcccctcagttcatgtacggctccagggccttcaccaagtgcctttcatacgagaccgagatcctgactgtcgagtacggattgcttcctatcggcaaaatcgtggagaagaggattgaatgtaccgtctattcagtcgataataatgggaacatctacacacagcccgtggctcaatggcacgacagaggagagcaggaagtttttgaatactgtctcgaggacggatccctcatccgcgctactaaagatcataagtttatgaccgtggacggccagatgctgccaattgacgaaatttttgaacgagagctggatctgatgagagtcgacaaccttccaaacggtggaggggggtcaggctctgcgcagctggaaaaggagcttcaagccctcgaaaaaaagttggcccagctcgagtgggagaaccaggctctggagaaagaactggcccagtgattaattaagaattcgacccagctttcttgtacaaagtggttggtaagcctatccctaaccctctcctcggtctcgattctacgtagtaatgagctagcagtctcgaggttaacgaattccgccccccccctaacgttactggccgaagccgcttggaataaggccggtgtgcgcttgtctatatgttattttccaccatattgccgtcttttggcaatgtgagggcccggaaacctggccctgtcttcttgacgagcattcctaggggtctttcccctctcgccaaaggaatgcaaggtctgttgaatgtcgtgaaggaagcagttcctctggaagcttcttgaagacaaacaacgtctgtagcgaccctttgcaggcagcggaaccccccacctggcgacaggtgcccctgcggccaaaagccacgtgtataagatacacctgcaaaggcggcacaaccccagtgccacgttgtgagttggatagttgtggaaagagtcaaatggctctcctcaagcgtattcaacaaggggctgaaggatgcccagaaggtaccccattgtatgggatctgatctggggcctcggtgcacatgctttacatgtgtttagtcgaggttaaaaaaacgtctaggccccccgaaccacggggacgtggttttcctttgaaaaacacgataataccatggccatgagcgagctgattaaggagaacatgcacatgaagctgtacatggagggcaccgtggacaaccatcacttcaagtgcacatccgagggcgaaggcaagccctacgagggcacccagaccatgagaatcaaggtggtcgagggcggccctctccccttcgccttcgacatcctggctactagcttcctctacggcagcaagaccttcatcaaccacacccagggcatccccgacttcttcaagcagtccttccctgagggcttcacatgggagagagtcaccacatacgaagacgggggcgtgctgaccgctacccaggacaccagcctccaggacggctgcctcatctacaacgtcaagatcagaggggtgaacttcacatccaacggccctgtgatgcagaagaaaacactcggctgggaggccttcaccgagacgctgtaccccgctgacggcggcctggaaggcagaaacgacatggccctgaagctcgtgggcgggagccatctgatcgcaaacatcaagaccacatatagatccaagaaacccgctaagaacctcaagatgcctggcgtctactatgtggactacagactggaaagaatcaaggaggccaacaacgagacctacgtcgagcagcacgaggtggcagtggccagatactgcgacctccctagcaaactggggcacaagcttaattaacaccggtggcgcgttaagtcgacaatcaacctctggattacaaaatttgtgaaagattgactggtattcttaactatgttgctccttttacgctatgtggatacgctgctttaatgcctttgtatcatgctattgcttcccgtatggctttcattttctcctccttgtataaatcctggttgctgtctctttatgaggagttgtggcccgttgtcaggcaacgtggcgtggtgtgcactgtgtttgctgacgcaacccccactggttggggcattgccaccacctgtcagctcctttccgggactttcgctttccccctccctattgccacggcggaactcatcgccgcctgccttgcccgctgctggacaggggctcggctgttgggcactgacaattccgtggtgttgtcggggaaatcatcgtcctttccttggctgctcgcctgtgttgccacctggattctgcgcgggacgtccttctgctacgtcccttcggccctcaatccagcggaccttccttcccgcggcctgctgccggctctgcggcctcttccgcgtcttcgccttcgccctcagacgagtcggatctccctttgggccgcctccccgcgtcgactttaagaccaatgacttacaaggcagctgtagatcttagccactttttaaaagaaaaggggggactggaagggctaattcactcccaacgaagacaagatctgctttttgcttgtactgggtctctctggttagaccagatctgagcctgggagctctctggctaactagggaacccactgcttaagcctcaataaagcttgccttgagtgcttcaagtagtgtgtgcccgtctgttgtgtgactctggtaactagagatccctcagacccttttagtcagtgtggaaaatctctagcagtacgtatagtagttcatgtcatcttattattcagtatttataacttgcaaagaaatgaatatcagagagtgagaggaacttgtttattgcagcttataatggttacaaataaagcaatagcatcacaaatttcacaaataaagcatttttttcactgcattctagttgtggtttgtccaaactcatcaatgtatcttatcatgtctggctctagctatcccgcccctaactccgcccatcccgcccctaactccgcccagttccgcccattctccgccccatggctgactaattttttttatttatgcagaggccgaggccgcctcggcctctgagctattccagaagtagtgaggaggcttttttggaggcctagggacgtacccaattcgccctatagtgagtcgtattacgcgcgctcactggccgtcgttttacaacgtcgtgactgggaaaaccctggcgttacccaacttaatcgccttgcagcacatccccctttcgccagctggcgtaatagcgaagaggcccgcaccgatcgcccttcccaacagttgcgcagcctgaatggcgaatgggacgcgccctgtagcggcgcattaagcgcggcgggtgtggtggttacgcgcagcgtgaccgctacacttgccagcgccctagcgcccgctcctttcgctttcttcccttcctttctcgccacgttcgccggctttccccgtcaagctctaaatcgggggctccctttagggttccgatttagtgctttacggcacctcgaccccaaaaaacttgattagggtgatggttcacgtagtgggccatcgccctgatagacggtttttcgccctttgacgttggagtccacgttctttaatagtggactcttgttccaaactggaacaacactcaaccctatctcggtctattcttttgatttataagggattttgccgatttcggcctattggttaaaaaatgagctgatttaacaaaaatttaacgcgaattttaacaaaatattaacgcttacaatttaggtggcacttttcggggaaatgtgcgcggaacccctatttgtttatttttctaaatacattcaaatatgtatccgctcatgagacaataaccctgataaatgcttcaataatattgaaaaaggaagagtatgagtattcaacatttccgtgtcgcccttattcccttttttgcggcattttgccttcctgtttttgctcacccagaaacgctggtgaaagtaaaagatgctgaagatcagttgggtgcacgagtgggttacatcgaactggatctcaacagcggtaagatccttgagagttttcgccccgaagaacgttttccaatgatgagcacttttaaagttctgctatgtggcgcggtattatcccgtattgacgccgggcaagagcaactcggtcgccgcatacactattctcagaatgacttggttgagtactcaccagtcacagaaaagcatcttacggatggcatgacagtaagagaattatgcagtgctgccataaccatgagtgataacactgcggccaacttacttctgacaacgatcggaggaccgaaggagctaaccgcttttttgcacaacatgggggatcatgtaactcgccttgatcgttgggaaccggagctgaatgaagccataccaaacgacgagcgtgacaccacgatgcctgtagcaatggcaacaacgttgcgcaaactattaactggcgaactacttactctagcttcccggcaacaattaatagactggatggaggcggataaagttgcaggaccacttctgcgctcggcccttccggctggctggtttattgctgataaatctggagccggtgagcgtgggtctcgcggtatcattgcagcactggggccagatggtaagccctcccgtatcgtagttatctacacgacggggagtcaggcaactatggatgaacgaaatagacagatcgctgagataggtgcctcactgattaagcattggtaactgtcagaccaagtttactcatatatactttagattgatttaaaacttcatttttaatttaaaaggatctaggtgaagatcctttttgataatctcatgaccaaaatcccttaacgtgagttttcgttccactgagcgtcagaccccgtagaaaagatcaaaggatcttcttgagatcctttttttctgcgcgtaatctgctgcttgcaaacaaaaaaaccaccgctaccagcggtggtttgtttgccggatcaagagctaccaactctttttccgaaggtaactggcttcagcagagcgcagataccaaatactgttcttctagtgtagccgtagttaggccaccacttcaagaactctgtagcaccgcctacatacctcgctctgctaatcctgttaccagtggctgctgccagtggcgataagtcgtgtcttaccgggttggactcaagacgatagttaccggataaggcgcagcggtcgggctgaacggggggttcgtgcacacagcccagcttggagcgaacgacctacaccgaactgagatacctacagcgtgagctatgagaaagcgccacgcttcccgaagggagaaaggcggacaggtatccggtaagcggcagggtcggaacaggagagcgcacgagggagcttccagggggaaacgcctggtatctttatagtcctgtcgggtttcgccacctctgacttgagcgtcgatttttgtgatgctcgtcaggggggcggagcctatggaaaaacgccagcaacgcggcctttttacggttcctggccttttgctggccttttgctcacatgttctttcctgcgttatcccctgattctgtggataaccgtattaccgcctttgagtgagctgataccgctcgccgcagccgaacgaccgagcgcagcgagtcagtgagcgaggaagcggaagagcgcccaatacgcaaaccgcctctccccgcgcgttggccgattcattaatgcagctggcacgacaggtttcccgactggaaagcgggcagtgagcgcaacgcaattaatgtgagttagctcactcattaggcaccccaggctttacactttatgcttccggctcgtatgttgtgtggaattgtgagcggataacaatttcacacaggaaacagctatgaccatgattacgccaagcgcgcaattaaccctcactaaagggaacaaaagctggagctgcaagcttaatgtagtcttatgcaatactcttgtagtcttgcaacatggtaacgatgagttagcaacatgccttacaaggagagaaaaagcaccgtgcatgccgattggtggaagtaaggtggtacgatcgtgccttattaggaaggcaacagacgggtctgacatggattggacgaaccactgaattgccgcattgcagagatattgtatttaagtgcctagctcgatacataaacgggtctctctggttagaccagatctgagcctgggagctctctggctaactagggaacccactgcttaagcctcaataaagcttgccttgagtgcttcaagtagtgtgtgcccgtctgttgtgtgactctggtaactagagatccctcagacccttttagtcagtgtggaaaatctctagcagtggcgcccgaacagggacttgaaagcgaaagggaaaccagaggagctctctcgacgcaggactcggcttgctgaagcgcgcacggcaagaggcgaggggcggcgactggtgagtacgccaaaaattttgactagcggaggctagaaggagagagatgggtgcgagagcgtcagtattaagcgggggagaattagatcgcgatgggaaaaaattcggttaaggccagggggaaagaaaaaatataaattaaaacatatagtatgggcaagcagggagctagaacgattcgcagttaatcctggcctgttagaaacatcagaaggctgtagacaaatactgggacagctacaaccatcccttcagacaggatcagaagaacttagatcattatataatacagtagcaaccctctattgtgtgcatcaaaggatagagataaaagacaccaaggaagctttagacaagatagaggaagagcaaaacaaaagtaagaccaccgcacagcaagcggccgctgatcttcagacctggaggaggagatatgagggacaattggagaagtgaattatataaatataaagtagtaaaaattgaaccattaggagtagcacccaccaaggcaaagagaagagtggtgcagagagaaaaaagagcagtgggaataggagctttgttccttgggttcttgggagcagcaggaagcactatgggcgcagcgtcaatgacgctgacggtacaggccagacaattattgtctggtatagtgcagcagcagaacaatttgctgagggctattgaggcgcaacagcatctgttgcaactcacagtctggggcatcaagcagctccaggcaagaatcctggctgtggaaagatacctaaaggatcaacagctcctggggatttggggttgctctggaaaactcatttgcaccactgctgtgccttggaatgctagttggagtaataaatctctggaacagatttggaatcacacgacctggatggagtgggacagagaaattaacaattacacaagcttaatacactccttaattgaagaatcgcaaaaccagcaagaaaagaatgaacaagaattattggaattagataaatgggcaagtttgtggaattggtttaacataacaaattggctgtggtatataaaattattcataatgatagtaggaggcttggtaggtttaagaatagtttttgctgtactttctatagtgaatagagttaggcagggatattcaccattatcgtttcagacccacctcccaaccccgaggggacccttgcgccttttccaaggcagccctgggtttgcgcagggacgcggctgctctgggcgtggttccgggaaacgcagcggcgccgaccctgggtctcgcacattcttcacgtccgttcgcagcgtcacccggatcttcgccgctacccttgtgggccccccggcgacgcttcctgctccgcccctaagtcgggaaggttccttgcggttcgcggcgtgccggacgtgacaaacggaagccgcacgtctcactagtaccctcgcagacggacagcgccagggagcaatggcagcgcgccgaccgcgatgggctgtggccaatagcggctgctcagcagggcgcgccgagagcagcggccgggaaggggcggtgcgggaggcggggtgtggggcggtagtgtgggccctgttcctgcccgcgcggtgttccgcattctgcaagcctccggagcgcacgtcggcagtcggctccctcgttgaccgaatcaccgacctctctccccagggggtacccagctgtctagagaattctagatcttgagacaaatggcagtattcatccacaattttaaaagaaaaggggggattggggggtacagtgcaggggaaagaatagtagacataatagcaacagacatacaaactaaagaattacaaaaacaaattacaaaaattcaaaattttcgggtttattacagggacagcagagatccactttggcgccggctcgaggggg

SEQ ID NO: 83 - protein, 214 aa, Artificial Sequence
  Synthetic Polypeptide
MVSKGEAVIKEFMRFKVHMEGSMNGHEFEIEGEGEGRPYEGTQTAKLKVTKGGPLPFSWDILSPQFMYGSRAFTKCLSYETEILTVEYGLLPIGKIVEKRIECTVYSVDNNGNIYTQPVAQWHDRGEQEVFEYCLEDGSLIRATKDHKFMTVDGQMLPIDEIFERELDLMRVDNLPNGGGGSGSAQLEKELQALEKKLAQLEWENQALEKELAQ

SEQ ID NO: 84 - DNA, 9357 bp, Artificial Sequence
  Synthetic Polynucleotide
cccggggttattaatagtaatcaattacggggtcattagttcatagcccatatatggagttccgcgttacataacttacggtaaatggcccgcctggctgaccgcccaacgacccccgcccattgacgtcaataatgacgtatgttcccatagtaacgccaatagggactttccattgacgtcaatgggtggagtatttacggtaaactgcccacttggcagtacatcaagtgtatcatatgccaagtacgccccctattgacgtcaatgacggtaaatggcccgcctggcattatgcccagtacatgaccttatgggactttcctacttggcagtacatctacgtattagtcatcgctattaccatggtgatgcggttttggcagtacatcaatgggcgtggatagcggtttgactcacggggatttccaagtctccaccccattgacgtcaatgggagtttgttttggcaccaaaatcaacgggactttccaaaatgtcgtaacaactccgccccattgacgcaaatgggcggtaggcgtgtacggtgggaggtctatataagcagagctctctggctaactgtcgggatcaacaagtttgtacaaaaaagcaggctccgaattcaccggtgccgccaccatggctcaactgaagaagaaactccaggccaataagaaagaactggcacagctgaagtggaagctgcaggcactgaaaaagaagctggcacagggcggaggaggctcaggcagtatgattaagatcgctacgcggaagtacctggggaaacagaacgtctacgacataggtgtggagcgcgatcacaactttgctctgaaaaatggatttatcgccagcaactgccaccccgccgacatccccgactactataagcagtccttccccgagggcttcaagtgggagcgcgtgatgaacttcgaggacggcggcgccgtgaccgtgacccaggacacctccctggaggacggcaccctgatctacaaggtgaagctccgcggcaccaacttccctcctgacggccccgtaatgcagaagaagacaatgggctgggaagcgtccaccgagcggttgtaccccgaggacggcgtgctgaagggcgacattaagatggccctgcgcctgaaggacggcggccgctacctggcggacttcaagaccacctacaaggccaagaagcccgtgcagatgcccggcgcctacaacgtcgaccgcaagttggacatcacctcccacaacgaggactacaccgtggtggaacagtacgaacgctccgagggccgccactccaccggcggcatggacgagctgtacaagtgattaattaagaattcgacccagctttcttgtacaaagtggttggtaagcctatccctaaccctctcctcggtctcgattctacgtagtaatgagctagcagtctcgaggttaacgaattccgccccccccctaacgttactggccgaagccgcttggaataaggccggtgtgcgcttgtctatatgttattttccaccatattgccgtcttttggcaatgtgagggcccggaaacctggccctgtcttcttgacgagcattcctaggggtctttcccctctcgccaaaggaatgcaaggtctgttgaatgtcgtgaaggaagcagttcctctggaagcttcttgaagacaaacaacgtctgtagcgaccctttgcaggcagcggaaccccccacctggcgacaggtgcccctgcggccaaaagccacgtgtataagatacacctgcaaaggcggcacaaccccagtgccacgttgtgagttggatagttgtggaaagagtcaaatggctctcctcaagcgtattcaacaaggggctgaaggatgcccagaaggtaccccattgtatgggatctgatctggggcctcggtgcacatgctttacatgtgtttagtcgaggttaaaaaaacgtctaggccccccgaaccacggggacgtggttttcctttgaaaaacacgataataccatggtgagcaagggcgaggagctgttcaccggggtggtgcccatcctggtcgagctggacggcgacgtaaacggccacaagttcagcgtgtccggcgagggcgagggcgatgccacctacggcaagctgaccctgaagttcatctgcaccaccggcaagctgcccgtgccctggcccaccctcgtgaccaccctgacctacggcgtgcagtgcttcagccgctaccccgaccacatgaagcagcacgacttcttcaagtccgccatgcccgaaggctacgtccaggagcgcaccatcttcttcaaggacgacggcaactacaagacccgcgccgaggtgaagttcgagggcgacaccctggtgaaccgcatcgagctgaagggcatcgacttcaaggaggacggcaacatcctggggcacaagctggagtacaactacaacagccacaacgtctatatcatggccgacaagcagaagaacggcatcaaggtgaacttcaagatccgccacaacatcgaggacggcagcgtgcagctcgccgaccactaccagcagaacacccccatcggcgacggccccgtgctgctgcccgacaaccactacctgagcacccagtccgccctgagcaaagaccccaacgagaagcgcgatcacatggtcctgctggagttcgtgaccgccgccgggatcactctcggcatggacgagctgtacaagtaacaccggtggcgcgttaagtcgacaatcaacctctggattacaaaatttgtgaaagattgactggtattcttaactatgttgctccttttacgctatgtggatacgctgctttaatgcctttgtatcatgctattgcttcccgtatggctttcattttctcctccttgtataaatcctggttgctgtctctttatgaggagttgtggcccgttgtcaggcaacgtggcgtggtgtgcactgtgtttgctgacgcaacccccactggttggggcattgccaccacctgtcagctcctttccgggactttcgctttccccctccctattgccacggcggaactcatcgccgcctgccttgcccgctgctggacaggggctcggctgttgggcactgacaattccgtggtgttgtcggggaaatcatcgtcctttccttggctgctcgcctgtgttgccacctggattctgcgcgggacgtccttctgctacgtcccttcggccctcaatccagcggaccttccttcccgcggcctgctgccggctctgcggcctcttccgcgtcttcgccttcgccctcagacgagtcggatctccctttgggccgcctccccgcgtcgactttaagaccaatgacttacaaggcagctgtagatcttagccactttttaaaagaaaaggggggactggaagggctaattcactcccaacgaagacaagatctgctttttgcttgtactgggtctctctggttagaccagatctgagcctgggagctctctggctaactagggaacccactgcttaagcctcaataaagcttgccttgagtgcttcaagtagtgtgtgcccgtctgttgtgtgactctggtaactagagatccctcagacccttttagtcagtgtggaaaatctctagcagtacgtatagtagttcatgtcatcttattattcagtatttataacttgcaaagaaatgaatatcagagagtgagaggaacttgtttattgcagcttataatggttacaaataaagcaatagcatcacaaatttcacaaataaagcatttttttcactgcattctagttgtggtttgtccaaactcatcaatgtatcttatcatgtctggctctagctatcccgcccctaactccgcccatcccgcccctaactccgcccagttccgcccattctccgccccatggctgactaattttttttatttatgcagaggccgaggccgcctcggcctctgagctattccagaagtagtgaggaggcttttttggaggcctagggacgtacccaattcgccctatagtgagtcgtattacgcgcgctcactggccgtcgttttacaacgtcgtgactgggaaaaccctggcgttacccaacttaatcgccttgcagcacatccccctttcgccagctggcgtaatagcgaagaggcccgcaccgatcgcccttcccaacagttgcgcagcctgaatggcgaatgggacgcgccctgtagcggcgcattaagcgcggcgggtgtggtggttacgcgcagcgtgaccgctacacttgccagcgccctagcgcccgctcctttcgctttcttcccttcctttctcgccacgttcgccggctttccccgtcaagctctaaatcgggggctccctttagggttccgatttagtgctttacggcacctcgaccccaaaaaacttgattagggtgatggttcacgtagtgggccatcgccctgatagacggtttttcgccctttgacgttggagtccacgttctttaatagtggactcttgttccaaactggaacaacactcaaccctatctcggtctattcttttgatttataagggattttgccgatttcggcctattggttaaaaaatgagctgatttaacaaaaatttaacgcgaattttaacaaaatattaacgcttacaatttaggtggcacttttcggggaaatgtgcgcggaacccctatttgtttatttttctaaatacattcaaatatgtatccgctcatgagacaataaccctgataaatgcttcaataatattgaaaaaggaagagtatgagtattcaacatttccgtgtcgcccttattcccttttttgcggcattttgccttcctgtttttgctcacccagaaacgctggtgaaagtaaaagatgctgaagatcagttgggtgcacgagtgggttacatcgaactggatctcaacagcggtaagatccttgagagttttcgccccgaagaacgttttccaatgatgagcacttttaaagttctgctatgtggcgcggtattatcccgtattgacgccgggcaagagcaactcggtcgccgcatacactattctcagaatgacttggttgagtactcaccagtcacagaaaagcatcttacggatggcatgacagtaagagaattatgcagtgctgccataaccatgagtgataacactgcggccaacttacttctgacaacgatcggaggaccgaaggagctaaccgcttttttgcacaacatgggggatcatgtaactcgccttgatcgttgggaaccggagctgaatgaagccataccaaacgacgagcgtgacaccacgatgcctgtagcaatggcaacaacgttgcgcaaactattaactggcgaactacttactctagcttcccggcaacaattaatagactggatggaggcggataaagttgcaggaccacttctgcgctcggcccttccggctggctggtttattgctgataaatctggagccggtgagcgtgggtctcgcggtatcattgcagcactggggccagatggtaagccctcccgtatcgtagttatctacacgacggggagtcaggcaactatggatgaacgaaatagacagatcgctgagataggtgcctcactgattaagcattggtaactgtcagaccaagtttactcatatatactttagattgatttaaaacttcatttttaatttaaaaggatctaggtgaagatcctttttgataatctcatgaccaaaatcccttaacgtgagttttcgttccactgagcgtcagaccccgtagaaaagatcaaaggatcttcttgagatcctttttttctgcgcgtaatctgctgcttgcaaacaaaaaaaccaccgctaccagcggtggtttgtttgccggatcaagagctaccaactctttttccgaaggtaactggcttcagcagagcgcagataccaaatactgttcttctagtgtagccgtagttaggccaccacttcaagaactctgtagcaccgcctacatacctcgctctgctaatcctgttaccagtggctgctgccagtggcgataagtcgtgtcttaccgggttggactcaagacgatagttaccggataaggcgcagcggtcgggctgaacggggggttcgtgcacacagcccagcttggagcgaacgacctacaccgaactgagatacctacagcgtgagctatgagaaagcgccacgcttcccgaagggagaaaggcggacaggtatccggtaagcggcagggtcggaacaggagagcgcacgagggagcttccagggggaaacgcctggtatctttatagtcctgtcgggtttcgccacctctgacttgagcgtcgatttttgtgatgctcgtcaggggggcggagcctatggaaaaacgccagcaacgcggcctttttacggttcctggccttttgctggccttttgctcacatgttctttcctgcgttatcccctgattctgtggataaccgtattaccgcctttgagtgagctgataccgctcgccgcagccgaacgaccgagcgcagcgagtcagtgagcgaggaagcggaagagcgcccaatacgcaaaccgcctctccccgcgcgttggccgattcattaatgcagctggcacgacaggtttcccgactggaaagcgggcagtgagcgcaacgcaattaatgtgagttagctcactcattaggcaccccaggctttacactttatgcttccggctcgtatgttgtgtggaattgtgagcggataacaatttcacacaggaaacagctatgaccatgattacgccaagcgcgcaattaaccctcactaaagggaacaaaagctggagctgcaagcttaatgtagtcttatgcaatactcttgtagtcttgcaacatggtaacgatgagttagcaacatgccttacaaggagagaaaaagcaccgtgcatgccgattggtggaagtaaggtggtacgatcgtgccttattaggaaggcaacagacgggtctgacatggattggacgaaccactgaattgccgcattgcagagatattgtatttaagtgcctagctcgatacataaacgggtctctctggttagaccagatctgagcctgggagctctctggctaactagggaacccactgcttaagcctcaataaagcttgccttgagtgcttcaagtagtgtgtgcccgtctgttgtgtgactctggtaactagagatccctcagacccttttagtcagtgtggaaaatctctagcagtggcgcccgaacagggacttgaaagcgaaagggaaaccagaggagctctctcgacgcaggactcggcttgctgaagcgcgcacggcaagaggcgaggggcggcgactggtgagtacgccaaaaattttgactagcggaggctagaaggagagagatgggtgcgagagcgtcagtattaagcgggggagaattagatcgcgatgggaaaaaattcggttaaggccagggggaaagaaaaaatataaattaaaacatatagtatgggcaagcagggagctagaacgattcgcagttaatcctggcctgttagaaacatcagaaggctgtagacaaatactgggacagctacaaccatcccttcagacaggatcagaagaacttagatcattatataatacagtagcaaccctctattgtgtgcatcaaaggatagagataaaagacaccaaggaagctttagacaagatagaggaagagcaaaacaaaagtaagaccaccgcacagcaagcggccgctgatcttcagacctggaggaggagatatgagggacaattggagaagtgaattatataaatataaagtagtaaaaattgaaccattaggagtagcacccaccaaggcaaagagaagagtggtgcagagagaaaaaagagcagtgggaataggagctttgttccttgggttcttgggagcagcaggaagcactatgggcgcagcgtcaatgacgctgacggtacaggccagacaattattgtctggtatagtgcagcagcagaacaatttgctgagggctattgaggcgcaacagcatctgttgcaactcacagtctggggcatcaagcagctccaggcaagaatcctggctgtggaaagatacctaaaggatcaacagctcctggggatttggggttgctctggaaaactcatttgcaccactgctgtgccttggaatgctagttggagtaataaatctctggaacagatttggaatcacacgacctggatggagtgggacagagaaattaacaattacacaagcttaatacactccttaattgaagaatcgcaaaaccagcaagaaaagaatgaacaagaattattggaattagataaatgggcaagtttgtggaattggtttaacataacaaattggctgtggtatataaaattattcataatgatagtaggaggcttggtaggtttaagaatagtttttgctgtactttctatagtgaatagagttaggcagggatattcaccattatcgtttcagacccacctcccaaccccgaggggacccttgcgccttttccaaggcagccctgggtttgcgcagggacgcggctgctctgggcgtggttccgggaaacgcagcggcgccgaccctgggtctcgcacattcttcacgtccgttcgcagcgtcacccggatcttcgccgctacccttgtgggccccccggcgacgcttcctgctccgcccctaagtcgggaaggttccttgcggttcgcggcgtgccggacgtgacaaacggaagccgcacgtctcactagtaccctcgcagacggacagcgccagggagcaatggcagcgcgccgaccgcgatgggctgtggccaatagcggctgctcagcagggcgcgccgagagcagcggccgggaaggggcggtgcgggaggcggggtgtggggcggtagtgtgggccctgttcctgcccgcgcggtgttccgcattctgcaagcctccggagcgcacgtcggcagtcggctccctcgttgaccgaatcaccgacctctctccccagggggtacccagctgtctagagaattctagatcttgagacaaatggcagtattcatccacaattttaaaagaaaaggggggattggggggtacagtgcaggggaaagaatagtagacataatagcaacagacatacaaactaaagaattacaaaaacaaattacaaaaattcaaaattttcgggtttattacagggacagcagagatccactttggcgccggctcgaggggg

SEQ ID NO: 85 - protein, 232 aa, Artificial Sequence
  Synthetic Polypeptide
MAQLKKKLQANKKELAQLKWKLQALKKKLAQGGGGSGSMIKIATRKYLGKQNVYDIGVERDHNFALKNGFIASNCHPADIPDYYKQSFPEGFKWERVMNFEDGGAVTVTQDTSLEDGTLIYKVKLRGTNFPPDGPVMQKKTMGWEASTERLYPEDGVLKGDIKMALRLKDGGRYLADFKTTYKAKKPVQMPGAYNVDRKLDITSHNEDYTVVEQYERSEGRHSTGGMDELYK

SEQ ID NO: 86 - DNA, 9432 bp, Artificial Sequence
  Synthetic Polynucleotide
cccggggttattaatagtaatcaattacggggtcattagttcatagcccatatatggagttccgcgttacataacttacggtaaatggcccgcctggctgaccgcccaacgacccccgcccattgacgtcaataatgacgtatgttcccatagtaacgccaatagggactttccattgacgtcaatgggtggagtatttacggtaaactgcccacttggcagtacatcaagtgtatcatatgccaagtacgccccctattgacgtcaatgacggtaaatggcccgcctggcattatgcccagtacatgaccttatgggactttcctacttggcagtacatctacgtattagtcatcgctattaccatggtgatgcggttttggcagtacatcaatgggcgtggatagcggtttgactcacggggatttccaagtctccaccccattgacgtcaatgggagtttgttttggcaccaaaatcaacgggactttccaaaatgtcgtaacaactccgccccattgacgcaaatgggcggtaggcgtgtacggtgggaggtctatataagcagagctctctggctaactgtcgggatcaacaagtttgtacaaaaaagcaggctccgaattcaccggtgccgccaccatggtgagcaagggcgaggcagtgatcaaggagttcatgcggttcaaggtgcacatggagggctccatgaacggccacgagttcgagatcgagggcgagggcgagggccgcccctacgagggcacccagaccgccaagctgaaggtgaccaagggtggccccctgcccttctcctgggacatcctgtcccctcagttcatgtacggctccagggccttcaccaagcaccccgccgacatccccgactactataagcagtccttccccgagggcttcaagtgggagcgcgtgatgaacttcgaggacggcggcgccgtgaccgtgacccaggacacctccctggaggacggcaccctgatctacaagtgcctttcatacgagaccgagatcctgactgtcgagtacggattgcttcctatcggcaaaatcgtggagaagaggattgaatgtaccgtctattcagtcgataataatgggaacatctacacacagcccgtggctcaatggcacgacagaggagagcaggaagtttttgaatactgtctcgaggacggatccctcatccgcgctactaaagatcataagtttatgaccgtggacggccagatgctgccaattgacgaaatttttgaacgagagctggatctgatgagagtcgacaaccttccaaacggtggaggggggtcaggctctgcgcagctggaaaaggagcttcaagccctcgaaaaaaagttggcccagctcgagtgggagaaccaggctctggagaaagaactggcccagtgattaattaagaattcgacccagctttcttgtacaaagtggttggtaagcctatccctaaccctctcctcggtctcgattctacgtagtaatgagctagcagtctcgaggttaacgaattccgccccccccctaacgttactggccgaagccgcttggaataaggccggtgtgcgcttgtctatatgttattttccaccatattgccgtcttttggcaatgtgagggcccggaaacctggccctgtcttcttgacgagcattcctaggggtctttcccctctcgccaaaggaatgcaaggtctgttgaatgtcgtgaaggaagcagttcctctggaagcttcttgaagacaaacaacgtctgtagcgaccctttgcaggcagcggaaccccccacctggcgacaggtgcccctgcggccaaaagccacgtgtataagatacacctgcaaaggcggcacaaccccagtgccacgttgtgagttggatagttgtggaaagagtcaaatggctctcctcaagcgtattcaacaaggggctgaaggatgcccagaaggtaccccattgtatgggatctgatctggggcctcggtgcacatgctttacatgtgtttagtcgaggttaaaaaaacgtctaggccccccgaaccacggggacgtggttttcctttgaaaaacacgataataccatggccatgagcgagctgattaaggagaacatgcacatgaagctgtacatggagggcaccgtggacaaccatcacttcaagtgcacatccgagggcgaaggcaagccctacgagggcacccagaccatgagaatcaaggtggtcgagggcggccctctccccttcgccttcgacatcctggctactagcttcctctacggcagcaagaccttcatcaaccacacccagggcatccccgacttcttcaagcagtccttccctgagggcttcacatgggagagagtcaccacatacgaagacgggggcgtgctgaccgctacccaggacaccagcctccaggacggctgcctcatctacaacgtcaagatcagaggggtgaacttcacatccaacggccctgtgatgcagaagaaaacactcggctgggaggccttcaccgagacgctgtaccccgctgacggcggcctggaaggcagaaacgacatggccctgaagctcgtgggcgggagccatctgatcgcaaacatcaagaccacatatagatccaagaaacccgctaagaacctcaagatgcctggcgtctactatgtggactacagactggaaagaatcaaggaggccaacaacgagacctacgtcgagcagcacgaggtggcagtggccagatactgcgacctccctagcaaactggggcacaagcttaattaacaccggtggcgcgttaagtcgacaatcaacctctggattacaaaatttgtgaaagattgactggtattcttaactatgttgctccttttacgctatgtggatacgctgctttaatgcctttgtatcatgctattgcttcccgtatggctttcattttctcctccttgtataaatcctggttgctgtctctttatgaggagttgtggcccgttgtcaggcaacgtggcgtggtgtgcactgtgtttgctgacgcaacccccactggttggggcattgccaccacctgtcagctcctttccgggactttcgctttccccctccctattgccacggcggaactcatcgccgcctgccttgcccgctgctggacaggggctcggctgttgggcactgacaattccgtggtgttgtcggggaaatcatcgtcctttccttggctgctcgcctgtgttgccacctggattctgcgcgggacgtccttctgctacgtcccttcggccctcaatccagcggaccttccttcccgcggcctgctgccggctctgcggcctcttccgcgtcttcgccttcgccctcagacgagtcggatctccctttgggccgcctccccgcgtcgactttaagaccaatgacttacaaggcagctgtagatcttagccactttttaaaagaaaaggggggactggaagggctaattcactcccaacgaagacaagatctgctttttgcttgtactgggtctctctggttagaccagatctgagcctgggagctctctggctaactagggaacccactgcttaagcctcaataaagcttgccttgagtgcttcaagtagtgtgtgcccgtctgttgtgtgactctggtaactagagatccctcagacccttttagtcagtgtggaaaatctctagcagtacgtatagtagttcatgtcatcttattattcagtatttataacttgcaaagaaatgaatatcagagagtgagaggaacttgtttattgcagcttataatggttacaaataaagcaatagcatcacaaatttcacaaataaagcatttttttcactgcattctagttgtggtttgtccaaactcatcaatgtatcttatcatgtctggctctagctatcccgcccctaactccgcccatcccgcccctaactccgcccagttccgcccattctccgccccatggctgactaattttttttatttatgcagaggccgaggccgcctcggcctctgagctattccagaagtagtgaggaggcttttttggaggcctagggacgtacccaattcgccctatagtgagtcgtattacgcgcgctcactggccgtcgttttacaacgtcgtgactgggaaaaccctggcgttacccaacttaatcgccttgcagcacatccccctttcgccagctggcgtaatagcgaagaggcccgcaccgatcgcccttcccaacagttgcgcagcctgaatggcgaatgggacgcgccctgtagcggcgcattaagcgcggcgggtgtggtggttacgcgcagcgtgaccgctacacttgccagcgccctagcgcccgctcctttcgctttcttcccttcctttctcgccacgttcgccggctttccccgtcaagctctaaatcgggggctccctttagggttccgatttagtgctttacggcacctcgaccccaaaaaacttgattagggtgatggttcacgtagtgggccatcgccctgatagacggtttttcgccctttgacgttggagtccacgttctttaatagtggactcttgttccaaactggaacaacactcaaccctatctcggtctattcttttgatttataagggattttgccgatttcggcctattggttaaaaaatgagctgatttaacaaaaatttaacgcgaattttaacaaaatattaacgcttacaatttaggtggcacttttcggggaaatgtgcgcggaacccctatttgtttatttttctaaatacattcaaatatgtatccgctcatgagacaataaccctgataaatgcttcaataatattgaaaaaggaagagtatgagtattcaacatttccgtgtcgcccttattcccttttttgcggcattttgccttcctgtttttgctcacccagaaacgctggtgaaagtaaaagatgctgaagatcagttgggtgcacgagtgggttacatcgaactggatctcaacagcggtaagatccttgagagttttcgccccgaagaacgttttccaatgatgagcacttttaaagttctgctatgtggcgcggtattatcccgtattgacgccgggcaagagcaactcggtcgccgcatacactattctcagaatgacttggttgagtactcaccagtcacagaaaagcatcttacggatggcatgacagtaagagaattatgcagtgctgccataaccatgagtgataacactgcggccaacttacttctgacaacgatcggaggaccgaaggagctaaccgcttttttgcacaacatgggggatcatgtaactcgccttgatcgttgggaaccggagctgaatgaagccataccaaacgacgagcgtgacaccacgatgcctgtagcaatggcaacaacgttgcgcaaactattaactggcgaactacttactctagcttcccggcaacaattaatagactggatggaggcggataaagttgcaggaccacttctgcgctcggcccttccggctggctggtttattgctgataaatctggagccggtgagcgtgggtctcgcggtatcattgcagcactggggccagatggtaagccctcccgtatcgtagttatctacacgacggggagtcaggcaactatggatgaacgaaatagacagatcgctgagataggtgcctcactgattaagcattggtaactgtcagaccaagtttactcatatatactttagattgatttaaaacttcatttttaatttaaaaggatctaggtgaagatcctttttgataatctcatgaccaaaatcccttaacgtgagttttcgttccactgagcgtcagaccccgtagaaaagatcaaaggatcttcttgagatcctttttttctgcgcgtaatctgctgcttgcaaacaaaaaaaccaccgctaccagcggtggtttgtttgccggatcaagagctaccaactctttttccgaaggtaactggcttcagcagagcgcagataccaaatactgttcttctagtgtagccgtagttaggccaccacttcaagaactctgtagcaccgcctacatacctcgctctgctaatcctgttaccagtggctgctgccagtggcgataagtcgtgtcttaccgggttggactcaagacgatagttaccggataaggcgcagcggtcgggctgaacggggggttcgtgcacacagcccagcttggagcgaacgacctacaccgaactgagatacctacagcgtgagctatgagaaagcgccacgcttcccgaagggagaaaggcggacaggtatccggtaagcggcagggtcggaacaggagagcgcacgagggagcttccagggggaaacgcctggtatctttatagtcctgtcgggtttcgccacctctgacttgagcgtcgatttttgtgatgctcgtcaggggggcggagcctatggaaaaacgccagcaacgcggcctttttacggttcctggccttttgctggccttttgctcacatgttctttcctgcgttatcccctgattctgtggataaccgtattaccgcctttgagtgagctgataccgctcgccgcagccgaacgaccgagcgcagcgagtcagtgagcgaggaagcggaagagcgcccaatacgcaaaccgcctctccccgcgcgttggccgattcattaatgcagctggcacgacaggtttcccgactggaaagcgggcagtgagcgcaacgcaattaatgtgagttagctcactcattaggcaccccaggctttacactttatgcttccggctcgtatgttgtgtggaattgtgagcggataacaatttcacacaggaaacagctatgaccatgattacgccaagcgcgcaattaaccctcactaaagggaacaaaagctggagctgcaagcttaatgtagtcttatgcaatactcttgtagtcttgcaacatggtaacgatgagttagcaacatgccttacaaggagagaaaaagcaccgtgcatgccgattggtggaagtaaggtggtacgatcgtgccttattaggaaggcaacagacgggtctgacatggattggacgaaccactgaattgccgcattgcagagatattgtatttaagtgcctagctcgatacataaacgggtctctctggttagaccagatctgagcctgggagctctctggctaactagggaacccactgcttaagcctcaataaagcttgccttgagtgcttcaagtagtgtgtgcccgtctgttgtgtgactctggtaactagagatccctcagacccttttagtcagtgtggaaaatctctagcagtggcgcccgaacagggacttgaaagcgaaagggaaaccagaggagctctctcgacgcaggactcggcttgctgaagcgcgcacggcaagaggcgaggggcggcgactggtgagtacgccaaaaattttgactagcggaggctagaaggagagagatgggtgcgagagcgtcagtattaagcgggggagaattagatcgcgatgggaaaaaattcggttaaggccagggggaaagaaaaaatataaattaaaacatatagtatgggcaagcagggagctagaacgattcgcagttaatcctggcctgttagaaacatcagaaggctgtagacaaatactgggacagctacaaccatcccttcagacaggatcagaagaacttagatcattatataatacagtagcaaccctctattgtgtgcatcaaaggatagagataaaagacaccaaggaagctttagacaagatagaggaagagcaaaacaaaagtaagaccaccgcacagcaagcggccgctgatcttcagacctggaggaggagatatgagggacaattggagaagtgaattatataaatataaagtagtaaaaattgaaccattaggagtagcacccaccaaggcaaagagaagagtggtgcagagagaaaaaagagcagtgggaataggagctttgttccttgggttcttgggagcagcaggaagcactatgggcgcagcgtcaatgacgctgacggtacaggccagacaattattgtctggtatagtgcagcagcagaacaatttgctgagggctattgaggcgcaacagcatctgttgcaactcacagtctggggcatcaagcagctccaggcaagaatcctggctgtggaaagatacctaaaggatcaacagctcctggggatttggggttgctctggaaaactcatttgcaccactgctgtgccttggaatgctagttggagtaataaatctctggaacagatttggaatcacacgacctggatggagtgggacagagaaattaacaattacacaagcttaatacactccttaattgaagaatcgcaaaaccagcaagaaaagaatgaacaagaattattggaattagataaatgggcaagtttgtggaattggtttaacataacaaattggctgtggtatataaaattattcataatgatagtaggaggcttggtaggtttaagaatagtttttgctgtactttctatagtgaatagagttaggcagggatattcaccattatcgtttcagacccacctcccaaccccgaggggacccttgcgccttttccaaggcagccctgggtttgcgcagggacgcggctgctctgggcgtggttccgggaaacgcagcggcgccgaccctgggtctcgcacattcttcacgtccgttcgcagcgtcacccggatcttcgccgctacccttgtgggccccccggcgacgcttcctgctccgcccctaagtcgggaaggttccttgcggttcgcggcgtgccggacgtgacaaacggaagccgcacgtctcactagtaccctcgcagacggacagcgccagggagcaatggcagcgcgccgaccgcgatgggctgtggccaatagcggctgctcagcagggcgcgccgagagcagcggccgggaaggggcggtgcgggaggcggggtgtggggcggtagtgtgggccctgttcctgcccgcgcggtgttccgcattctgcaagcctccggagcgcacgtcggcagtcggctccctcgttgaccgaatcaccgacctctctccccagggggtacccagctgtctagagaattctagatcttgagacaaatggcagtattcatccacaattttaaaagaaaaggggggattggggggtacagtgcaggggaaagaatagtagacataatagcaacagacatacaaactaaagaattacaaaaacaaattacaaaaattcaaaattttcgggtttattacagggacagcagagatccactttggcgccggctcgaggggg

SEQ ID NO: 87 - protein, 261 aa, Artificial Sequence
  Synthetic Polypeptide
MVSKGEAVIKEFMRFKVHMEGSMNGHEFEIEGEGEGRPYEGTQTAKLKVTKGGPLPFSWDILSPQFMYGSRAFTKHPADIPDYYKQSFPEGFKWERVMNFEDGGAVTVTQDTSLEDGTLIYKCLSYETEILTVEYGLLPIGKIVEKRIECTVYSVDNNGNIYTQPVAQWHDRGEQEVFEYCLEDGSLIRATKDHKFMTVDGQMLPIDEIFERELDLMRVDNLPNGGGGSGSAQLEKELQALEKKLAQLEWENQALEKELAQ

SEQ ID NO: 88 - DNA, 9216 bp, Artificial Sequence
  Synthetic Polynucleotide
cccggggttattaatagtaatcaattacggggtcattagttcatagcccatatatggagttccgcgttacataacttacggtaaatggcccgcctggctgaccgcccaacgacccccgcccattgacgtcaataatgacgtatgttcccatagtaacgccaatagggactttccattgacgtcaatgggtggagtatttacggtaaactgcccacttggcagtacatcaagtgtatcatatgccaagtacgccccctattgacgtcaatgacggtaaatggcccgcctggcattatgcccagtacatgaccttatgggactttcctacttggcagtacatctacgtattagtcatcgctattaccatggtgatgcggttttggcagtacatcaatgggcgtggatagcggtttgactcacggggatttccaagtctccaccccattgacgtcaatgggagtttgttttggcaccaaaatcaacgggactttccaaaatgtcgtaacaactccgccccattgacgcaaatgggcggtaggcgtgtacggtgggaggtctatataagcagagctctctggctaactgtcgggatcaacaagtttgtacaaaaaagcaggctccgaattcaccggtgccgccaccatggctcaactgaagaagaaactccaggccaataagaaagaactggcacagctgaagtggaagctgcaggcactgaaaaagaagctggcacagggcggaggaggctcaggcagtatgattaagatcgctacgcggaagtacctggggaaacagaacgtctacgacataggtgtggagcgcgatcacaactttgctctgaaaaatggatttatcgccagcaactgcgtgaagctccgcggcaccaacttccctcctgacggccccgtaatgcagaagaagacaatgggctgggaagcgtccaccgagcggttgtaccccgaggacggcgtgctgaagggcgacattaagatggccctgcgcctgaaggacggcggccgctacctggcggacttcaagaccacctacaaggccaagaagcccgtgcagatgcccggcgcctacaacgtcgaccgcaagttggacatcacctcccacaacgaggactacaccgtggtggaacagtacgaacgctccgagggccgccactccaccggcggcatggacgagctgtacaagtgattaattaagaattcgacccagctttcttgtacaaagtggttggtaagcctatccctaaccctctcctcggtctcgattctacgtagtaatgagctagcagtctcgaggttaacgaattccgccccccccctaacgttactggccgaagccgcttggaataaggccggtgtgcgcttgtctatatgttattttccaccatattgccgtcttttggcaatgtgagggcccggaaacctggccctgtcttcttgacgagcattcctaggggtctttcccctctcgccaaaggaatgcaaggtctgttgaatgtcgtgaaggaagcagttcctctggaagcttcttgaagacaaacaacgtctgtagcgaccctttgcaggcagcggaaccccccacctggcgacaggtgcccctgcggccaaaagccacgtgtataagatacacctgcaaaggcggcacaaccccagtgccacgttgtgagttggatagttgtggaaagagtcaaatggctctcctcaagcgtattcaacaaggggctgaaggatgcccagaaggtaccccattgtatgggatctgatctggggcctcggtgcacatgctttacatgtgtttagtcgaggttaaaaaaacgtctaggccccccgaaccacggggacgtggttttcctttgaaaaacacgataataccatggtgagcaagggcgaggagctgttcaccggggtggtgcccatcctggtcgagctggacggcgacgtaaacggccacaagttcagcgtgtccggcgagggcgagggcgatgccacctacggcaagctgaccctgaagttcatctgcaccaccggcaagctgcccgtgccctggcccaccctcgtgaccaccctgacctacggcgtgcagtgcttcagccgctaccccgaccacatgaagcagcacgacttcttcaagtccgccatgcccgaaggctacgtccaggagcgcaccatcttcttcaaggacgacggcaactacaagacccgcgccgaggtgaagttcgagggcgacaccctggtgaaccgcatcgagctgaagggcatcgacttcaaggaggacggcaacatcctggggcacaagctggagtacaactacaacagccacaacgtctatatcatggccgacaagcagaagaacggcatcaaggtgaacttcaagatccgccacaacatcgaggacggcagcgtgcagctcgccgaccactaccagcagaacacccccatcggcgacggccccgtgctgctgcccgacaaccactacctgagcacccagtccgccctgagcaaagaccccaacgagaagcgcgatcacatggtcctgctggagttcgtgaccgccgccgggatcactctcggcatggacgagctgtacaagtaacaccggtggcgcgttaagtcgacaatcaacctctggattacaaaatttgtgaaagattgactggtattcttaactatgttgctccttttacgctatgtggatacgctgctttaatgcctttgtatcatgctattgcttcccgtatggctttcattttctcctccttgtataaatcctggttgctgtctctttatgaggagttgtggcccgttgtcaggcaacgtggcgtggtgtgcactgtgtttgctgacgcaacccccactggttggggcattgccaccacctgtcagctcctttccgggactttcgctttccccctccctattgccacggcggaactcatcgccgcctgccttgcccgctgctggacaggggctcggctgttgggcactgacaattccgtggtgttgtcggggaaatcatcgtcctttccttggctgctcgcctgtgttgccacctggattctgcgcgggacgtccttctgctacgtcccttcggccctcaatccagcggaccttccttcccgcggcctgctgccggctctgcggcctcttccgcgtcttcgccttcgccctcagacgagtcggatctccctttgggccgcctccccgcgtcgactttaagaccaatgacttacaaggcagctgtagatcttagccactttttaaaagaaaaggggggactggaagggctaattcactcccaacgaagacaagatctgctttttgcttgtactgggtctctctggttagaccagatctgagcctgggagctctctggctaactagggaacccactgcttaagcctcaataaagcttgccttgagtgcttcaagtagtgtgtgcccgtctgttgtgtgactctggtaactagagatccctcagacccttttagtcagtgtggaaaatctctagcagtacgtatagtagttcatgtcatcttattattcagtatttataacttgcaaagaaatgaatatcagagagtgagaggaacttgtttattgcagcttataatggttacaaataaagcaatagcatcacaaatttcacaaataaagcatttttttcactgcattctagttgtggtttgtccaaactcatcaatgtatcttatcatgtctggctctagctatcccgcccctaactccgcccatcccgcccctaactccgcccagttccgcccattctccgccccatggctgactaattttttttatttatgcagaggccgaggccgcctcggcctctgagctattccagaagtagtgaggaggcttttttggaggcctagggacgtacccaattcgccctatagtgagtcgtattacgcgcgctcactggccgtcgttttacaacgtcgtgactgggaaaaccctggcgttacccaacttaatcgccttgcagcacatccccctttcgccagctggcgtaatagcgaagaggcccgcaccgatcgcccttcccaacagttgcgcagcctgaatggcgaatgggacgcgccctgtagcggcgcattaagcgcggcgggtgtggtggttacgcgcagcgtgaccgctacacttgccagcgccctagcgcccgctcctttcgctttcttcccttcctttctcgccacgttcgccggctttccccgtcaagctctaaatcgggggctccctttagggttccgatttagtgctttacggcacctcgaccccaaaaaacttgattagggtgatggttcacgtagtgggccatcgccctgatagacggtttttcgccctttgacgttggagtccacgttctttaatagtggactcttgttccaaactggaacaacactcaaccctatctcggtctattcttttgatttataagggattttgccgatttcggcctattggttaaaaaatgagctgatttaacaaaaatttaacgcgaattttaacaaaatattaacgcttacaatttaggtggcacttttcggggaaatgtgcgcggaacccctatttgtttatttttctaaatacattcaaatatgtatccgctcatgagacaataaccctgataaatgcttcaataatattgaaaaaggaagagtatgagtattcaacatttccgtgtcgcccttattcccttttttgcggcattttgccttcctgtttttgctcacccagaaacgctggtgaaagtaaaagatgctgaagatcagttgggtgcacgagtgggttacatcgaactggatctcaacagcggtaagatccttgagagttttcgccccgaagaacgttttccaatgatgagcacttttaaagttctgctatgtggcgcggtattatcccgtattgacgccgggcaagagcaactcggtcgccgcatacactattctcagaatgacttggttgagtactcaccagtcacagaaaagcatcttacggatggcatgacagtaagagaattatgcagtgctgccataaccatgagtgataacactgcggccaacttacttctgacaacgatcggaggaccgaaggagctaaccgcttttttgcacaacatgggggatcatgtaactcgccttgatcgttgggaaccggagctgaatgaagccataccaaacgacgagcgtgacaccacgatgcctgtagcaatggcaacaacgttgcgcaaactattaactggcgaactacttactctagcttcccggcaacaattaatagactggatggaggcggataaagttgcaggaccacttctgcgctcggcccttccggctggctggtttattgctgataaatctggagccggtgagcgtgggtctcgcggtatcattgcagcactggggccagatggtaagccctcccgtatcgtagttatctacacgacggggagtcaggcaactatggatgaacgaaatagacagatcgctgagataggtgcctcactgattaagcattggtaactgtcagaccaagtttactcatatatactttagattgatttaaaacttcatttttaatttaaaaggatctaggtgaagatcctttttgataatctcatgaccaaaatcccttaacgtgagttttcgttccactgagcgtcagaccccgtagaaaagatcaaaggatcttcttgagatcctttttttctgcgcgtaatctgctgcttgcaaacaaaaaaaccaccgctaccagcggtggtttgtttgccggatcaagagctaccaactctttttccgaaggtaactggcttcagcagagcgcagataccaaatactgttcttctagtgtagccgtagttaggccaccacttcaagaactctgtagcaccgcctacatacctcgctctgctaatcctgttaccagtggctgctgccagtggcgataagtcgtgtcttaccgggttggactcaagacgatagttaccggataaggcgcagcggtcgggctgaacggggggttcgtgcacacagcccagcttggagcgaacgacctacaccgaactgagatacctacagcgtgagctatgagaaagcgccacgcttcccgaagggagaaaggcggacaggtatccggtaagcggcagggtcggaacaggagagcgcacgagggagcttccagggggaaacgcctggtatctttatagtcctgtcgggtttcgccacctctgacttgagcgtcgatttttgtgatgctcgtcaggggggcggagcctatggaaaaacgccagcaacgcggcctttttacggttcctggccttttgctggccttttgctcacatgttctttcctgcgttatcccctgattctgtggataaccgtattaccgcctttgagtgagctgataccgctcgccgcagccgaacgaccgagcgcagcgagtcagtgagcgaggaagcggaagagcgcccaatacgcaaaccgcctctccccgcgcgttggccgattcattaatgcagctggcacgacaggtttcccgactggaaagcgggcagtgagcgcaacgcaattaatgtgagttagctcactcattaggcaccccaggctttacactttatgcttccggctcgtatgttgtgtggaattgtgagcggataacaatttcacacaggaaacagctatgaccatgattacgccaagcgcgcaattaaccctcactaaagggaacaaaagctggagctgcaagcttaatgtagtcttatgcaatactcttgtagtcttgcaacatggtaacgatgagttagcaacatgccttacaaggagagaaaaagcaccgtgcatgccgattggtggaagtaaggtggtacgatcgtgccttattaggaaggcaacagacgggtctgacatggattggacgaaccactgaattgccgcattgcagagatattgtatttaagtgcctagctcgatacataaacgggtctctctggttagaccagatctgagcctgggagctctctggctaactagggaacccactgcttaagcctcaataaagcttgccttgagtgcttcaagtagtgtgtgcccgtctgttgtgtgactctggtaactagagatccctcagacccttttagtcagtgtggaaaatctctagcagtggcgcccgaacagggacttgaaagcgaaagggaaaccagaggagctctctcgacgcaggactcggcttgctgaagcgcgcacggcaagaggcgaggggcggcgactggtgagtacgccaaaaattttgactagcggaggctagaaggagagagatgggtgcgagagcgtcagtattaagcgggggagaattagatcgcgatgggaaaaaattcggttaaggccagggggaaagaaaaaatataaattaaaacatatagtatgggcaagcagggagctagaacgattcgcagttaatcctggcctgttagaaacatcagaaggctgtagacaaatactgggacagctacaaccatcccttcagacaggatcagaagaacttagatcattatataatacagtagcaaccctctattgtgtgcatcaaaggatagagataaaagacaccaaggaagctttagacaagatagaggaagagcaaaacaaaagtaagaccaccgcacagcaagcggccgctgatcttcagacctggaggaggagatatgagggacaattggagaagtgaattatataaatataaagtagtaaaaattgaaccattaggagtagcacccaccaaggcaaagagaagagtggtgcagagagaaaaaagagcagtgggaataggagctttgttccttgggttcttgggagcagcaggaagcactatgggcgcagcgtcaatgacgctgacggtacaggccagacaattattgtctggtatagtgcagcagcagaacaatttgctgagggctattgaggcgcaacagcatctgttgcaactcacagtctggggcatcaagcagctccaggcaagaatcctggctgtggaaagatacctaaaggatcaacagctcctggggatttggggttgctctggaaaactcatttgcaccactgctgtgccttggaatgctagttggagtaataaatctctggaacagatttggaatcacacgacctggatggagtgggacagagaaattaacaattacacaagcttaatacactccttaattgaagaatcgcaaaaccagcaagaaaagaatgaacaagaattattggaattagataaatgggcaagtttgtggaattggtttaacataacaaattggctgtggtatataaaattattcataatgatagtaggaggcttggtaggtttaagaatagtttttgctgtactttctatagtgaatagagttaggcagggatattcaccattatcgtttcagacccacctcccaaccccgaggggacccttgcgccttttccaaggcagccctgggtttgcgcagggacgcggctgctctgggcgtggttccgggaaacgcagcggcgccgaccctgggtctcgcacattcttcacgtccgttcgcagcgtcacccggatcttcgccgctacccttgtgggccccccggcgacgcttcctgctccgcccctaagtcgggaaggttccttgcggttcgcggcgtgccggacgtgacaaacggaagccgcacgtctcactagtaccctcgcagacggacagcgccagggagcaatggcagcgcgccgaccgcgatgggctgtggccaatagcggctgctcagcagggcgcgccgagagcagcggccgggaaggggcggtgcgggaggcggggtgtggggcggtagtgtgggccctgttcctgcccgcgcggtgttccgcattctgcaagcctccggagcgcacgtcggcagtcggctccctcgttgaccgaatcaccgacctctctccccagggggtacccagctgtctagagaattctagatcttgagacaaatggcagtattcatccacaattttaaaagaaaaggggggattggggggtacagtgcaggggaaagaatagtagacataatagcaacagacatacaaactaaagaattacaaaaacaaattacaaaaattcaaaattttcgggtttattacagggacagcagagatccactttggcgccggctcgaggggg

SEQ ID NO: 89 - protein, 185 aa, Artificial Sequence
  Synthetic Polypeptide
MAQLKKKLQANKKELAQLKWKLQALKKKLAQGGGGSGSMIKIATRKYLGKQNVYDIGVERDHNFALKNGFIASNCVKLRGTNFPPDGPVMQKKTMGWEASTERLYPEDGVLKGDIKMALRLKDGGRYLADFKTTYKAKKPVQMPGAYNVDRKLDITSHNEDYTVVEQYERSEGRHSTGGMDELYK

SEQ ID NO: 90 - DNA, 9486 bp, Artificial Sequence
  Synthetic Polynucleotide
cccggggttattaatagtaatcaattacggggtcattagttcatagcccatatatggagttccgcgttacataacttacggtaaatggcccgcctggctgaccgcccaacgacccccgcccattgacgtcaataatgacgtatgttcccatagtaacgccaatagggactttccattgacgtcaatgggtggagtatttacggtaaactgcccacttggcagtacatcaagtgtatcatatgccaagtacgccccctattgacgtcaatgacggtaaatggcccgcctggcattatgcccagtacatgaccttatgggactttcctacttggcagtacatctacgtattagtcatcgctattaccatggtgatgcggttttggcagtacatcaatgggcgtggatagcggtttgactcacggggatttccaagtctccaccccattgacgtcaatgggagtttgttttggcaccaaaatcaacgggactttccaaaatgtcgtaacaactccgccccattgacgcaaatgggcggtaggcgtgtacggtgggaggtctatataagcagagctctctggctaactgtcgggatcaacaagtttgtacaaaaaagcaggctccgaattcaccggtgccgccaccatggtgagcaagggcgaggcagtgatcaaggagttcatgcggttcaaggtgcacatggagggctccatgaacggccacgagttcgagatcgagggcgagggcgagggccgcccctacgagggcacccagaccgccaagctgaaggtgaccaagggtggccccctgcccttctcctgggacatcctgtcccctcagttcatgtacggctccagggccttcaccaagcaccccgccgacatccccgactactataagcagtccttccccgagggcttcaagtgggagcgcgtgatgaacttcgaggacggcggcgccgtgaccgtgacccaggacacctccctggaggacggcaccctgatctacaaggtgaagctccgcggcaccaacttccctcctgacggccccgtaatgcagaagaagtgcctttcatacgagaccgagatcctgactgtcgagtacggattgcttcctatcggcaaaatcgtggagaagaggattgaatgtaccgtctattcagtcgataataatgggaacatctacacacagcccgtggctcaatggcacgacagaggagagcaggaagtttttgaatactgtctcgaggacggatccctcatccgcgctactaaagatcataagtttatgaccgtggacggccagatgctgccaattgacgaaatttttgaacgagagctggatctgatgagagtcgacaaccttccaaacggtggaggggggtcaggctctgcgcagctggaaaaggagcttcaagccctcgaaaaaaagttggcccagctcgagtgggagaaccaggctctggagaaagaactggcccagtgattaattaagaattcgacccagctttcttgtacaaagtggttggtaagcctatccctaaccctctcctcggtctcgattctacgtagtaatgagctagcagtctcgaggttaacgaattccgccccccccctaacgttactggccgaagccgcttggaataaggccggtgtgcgcttgtctatatgttattttccaccatattgccgtcttttggcaatgtgagggcccggaaacctggccctgtcttcttgacgagcattcctaggggtctttcccctctcgccaaaggaatgcaaggtctgttgaatgtcgtgaaggaagcagttcctctggaagcttcttgaagacaaacaacgtctgtagcgaccctttgcaggcagcggaaccccccacctggcgacaggtgcccctgcggccaaaagccacgtgtataagatacacctgcaaaggcggcacaaccccagtgccacgttgtgagttggatagttgtggaaagagtcaaatggctctcctcaagcgtattcaacaaggggctgaaggatgcccagaaggtaccccattgtatgggatctgatctggggcctcggtgcacatgctttacatgtgtttagtcgaggttaaaaaaacgtctaggccccccgaaccacggggacgtggttttcctttgaaaaacacgataataccatggccatgagcgagctgattaaggagaacatgcacatgaagctgtacatggagggcaccgtggacaaccatcacttcaagtgcacatccgagggcgaaggcaagccctacgagggcacccagaccatgagaatcaaggtggtcgagggcggccctctccccttcgccttcgacatcctggctactagcttcctctacggcagcaagaccttcatcaaccacacccagggcatccccgacttcttcaagcagtccttccctgagggcttcacatgggagagagtcaccacatacgaagacgggggcgtgctgaccgctacccaggacaccagcctccaggacggctgcctcatctacaacgtcaagatcagaggggtgaacttcacatccaacggccctgtgatgcagaagaaaacactcggctgggaggccttcaccgagacgctgtaccccgctgacggcggcctggaaggcagaaacgacatggccctgaagctcgtgggcgggagccatctgatcgcaaacatcaagaccacatatagatccaagaaacccgctaagaacctcaagatgcctggcgtctactatgtggactacagactggaaagaatcaaggaggccaacaacgagacctacgtcgagcagcacgaggtggcagtggccagatactgcgacctccctagcaaactggggcacaagcttaattaacaccggtggcgcgttaagtcgacaatcaacctctggattacaaaatttgtgaaagattgactggtattcttaactatgttgctccttttacgctatgtggatacgctgctttaatgcctttgtatcatgctattgcttcccgtatggctttcattttctcctccttgtataaatcctggttgctgtctctttatgaggagttgtggcccgttgtcaggcaacgtggcgtggtgtgcactgtgtttgctgacgcaacccccactggttggggcattgccaccacctgtcagctcctttccgggactttcgctttccccctccctattgccacggcggaactcatcgccgcctgccttgcccgctgctggacaggggctcggctgttgggcactgacaattccgtggtgttgtcggggaaatcatcgtcctttccttggctgctcgcctgtgttgccacctggattctgcgcgggacgtccttctgctacgtcccttcggccctcaatccagcggaccttccttcccgcggcctgctgccggctctgcggcctcttccgcgtcttcgccttcgccctcagacgagtcggatctccctttgggccgcctccccgcgtcgactttaagaccaatgacttacaaggcagctgtagatcttagccactttttaaaagaaaaggggggactggaagggctaattcactcccaacgaagacaagatctgctttttgcttgtactgggtctctctggttagaccagatctgagcctgggagctctctggctaactagggaacccactgcttaagcctcaataaagcttgccttgagtgcttcaagtagtgtgtgcccgtctgttgtgtgactctggtaactagagatccctcagacccttttagtcagtgtggaaaatctctagcagtacgtatagtagttcatgtcatcttattattcagtatttataacttgcaaagaaatgaatatcagagagtgagaggaacttgtttattgcagcttataatggttacaaataaagcaatagcatcacaaatttcacaaataaagcatttttttcactgcattctagttgtggtttgtccaaactcatcaatgtatcttatcatgtctggctctagctatcccgcccctaactccgcccatcccgcccctaactccgcccagttccgcccattctccgccccatggctgactaattttttttatttatgcagaggccgaggccgcctcggcctctgagctattccagaagtagtgaggaggcttttttggaggcctagggacgtacccaattcgccctatagtgagtcgtattacgcgcgctcactggccgtcgttttacaacgtcgtgactgggaaaaccctggcgttacccaacttaatcgccttgcagcacatccccctttcgccagctggcgtaatagcgaagaggcccgcaccgatcgcccttcccaacagttgcgcagcctgaatggcgaatgggacgcgccctgtagcggcgcattaagcgcggcgggtgtggtggttacgcgcagcgtgaccgctacacttgccagcgccctagcgcccgctcctttcgctttcttcccttcctttctcgccacgttcgccggctttccccgtcaagctctaaatcgggggctccctttagggttccgatttagtgctttacggcacctcgaccccaaaaaacttgattagggtgatggttcacgtagtgggccatcgccctgatagacggtttttcgccctttgacgttggagtccacgttctttaatagtggactcttgttccaaactggaacaacactcaaccctatctcggtctattcttttgatttataagggattttgccgatttcggcctattggttaaaaaatgagctgatttaacaaaaatttaacgcgaattttaacaaaatattaacgcttacaatttaggtggcacttttcggggaaatgtgcgcggaacccctatttgtttatttttctaaatacattcaaatatgtatccgctcatgagacaataaccctgataaatgcttcaataatattgaaaaaggaagagtatgagtattcaacatttccgtgtcgcccttattcccttttttgcggcattttgccttcctgtttttgctcacccagaaacgctggtgaaagtaaaagatgctgaagatcagttgggtgcacgagtgggttacatcgaactggatctcaacagcggtaagatccttgagagttttcgccccgaagaacgttttccaatgatgagcacttttaaagttctgctatgtggcgcggtattatcccgtattgacgccgggcaagagcaactcggtcgccgcatacactattctcagaatgacttggttgagtactcaccagtcacagaaaagcatcttacggatggcatgacagtaagagaattatgcagtgctgccataaccatgagtgataacactgcggccaacttacttctgacaacgatcggaggaccgaaggagctaaccgcttttttgcacaacatgggggatcatgtaactcgccttgatcgttgggaaccggagctgaatgaagccataccaaacgacgagcgtgacaccacgatgcctgtagcaatggcaacaacgttgcgcaaactattaactggcgaactacttactctagcttcccggcaacaattaatagactggatggaggcggataaagttgcaggaccacttctgcgctcggcccttccggctggctggtttattgctgataaatctggagccggtgagcgtgggtctcgcggtatcattgcagcactggggccagatggtaagccctcccgtatcgtagttatctacacgacggggagtcaggcaactatggatgaacgaaatagacagatcgctgagataggtgcctcactgattaagcattggtaactgtcagaccaagtttactcatatatactttagattgatttaaaacttcatttttaatttaaaaggatctaggtgaagatcctttttgataatctcatgaccaaaatcccttaacgtgagttttcgttccactgagcgtcagaccccgtagaaaagatcaaaggatcttcttgagatcctttttttctgcgcgtaatctgctgcttgcaaacaaaaaaaccaccgctaccagcggtggtttgtttgccggatcaagagctaccaactctttttccgaaggtaactggcttcagcagagcgcagataccaaatactgttcttctagtgtagccgtagttaggccaccacttcaagaactctgtagcaccgcctacatacctcgctctgctaatcctgttaccagtggctgctgccagtggcgataagtcgtgtcttaccgggttggactcaagacgatagttaccggataaggcgcagcggtcgggctgaacggggggttcgtgcacacagcccagcttggagcgaacgacctacaccgaactgagatacctacagcgtgagctatgagaaagcgccacgcttcccgaagggagaaaggcggacaggtatccggtaagcggcagggtcggaacaggagagcgcacgagggagcttccagggggaaacgcctggtatctttatagtcctgtcgggtttcgccacctctgacttgagcgtcgatttttgtgatgctcgtcaggggggcggagcctatggaaaaacgccagcaacgcggcctttttacggttcctggccttttgctggccttttgctcacatgttctttcctgcgttatcccctgattctgtggataaccgtattaccgcctttgagtgagctgataccgctcgccgcagccgaacgaccgagcgcagcgagtcagtgagcgaggaagcggaagagcgcccaatacgcaaaccgcctctccccgcgcgttggccgattcattaatgcagctggcacgacaggtttcccgactggaaagcgggcagtgagcgcaacgcaattaatgtgagttagctcactcattaggcaccccaggctttacactttatgcttccggctcgtatgttgtgtggaattgtgagcggataacaatttcacacaggaaacagctatgaccatgattacgccaagcgcgcaattaaccctcactaaagggaacaaaagctggagctgcaagcttaatgtagtcttatgcaatactcttgtagtcttgcaacatggtaacgatgagttagcaacatgccttacaaggagagaaaaagcaccgtgcatgccgattggtggaagtaaggtggtacgatcgtgccttattaggaaggcaacagacgggtctgacatggattggacgaaccactgaattgccgcattgcagagatattgtatttaagtgcctagctcgatacataaacgggtctctctggttagaccagatctgagcctgggagctctctggctaactagggaacccactgcttaagcctcaataaagcttgccttgagtgcttcaagtagtgtgtgcccgtctgttgtgtgactctggtaactagagatccctcagacccttttagtcagtgtggaaaatctctagcagtggcgcccgaacagggacttgaaagcgaaagggaaaccagaggagctctctcgacgcaggactcggcttgctgaagcgcgcacggcaagaggcgaggggcggcgactggtgagtacgccaaaaattttgactagcggaggctagaaggagagagatgggtgcgagagcgtcagtattaagcgggggagaattagatcgcgatgggaaaaaattcggttaaggccagggggaaagaaaaaatataaattaaaacatatagtatgggcaagcagggagctagaacgattcgcagttaatcctggcctgttagaaacatcagaaggctgtagacaaatactgggacagctacaaccatcccttcagacaggatcagaagaacttagatcattatataatacagtagcaaccctctattgtgtgcatcaaaggatagagataaaagacaccaaggaagctttagacaagatagaggaagagcaaaacaaaagtaagaccaccgcacagcaagcggccgctgatcttcagacctggaggaggagatatgagggacaattggagaagtgaattatataaatataaagtagtaaaaattgaaccattaggagtagcacccaccaaggcaaagagaagagtggtgcagagagaaaaaagagcagtgggaataggagctttgttccttgggttcttgggagcagcaggaagcactatgggcgcagcgtcaatgacgctgacggtacaggccagacaattattgtctggtatagtgcagcagcagaacaatttgctgagggctattgaggcgcaacagcatctgttgcaactcacagtctggggcatcaagcagctccaggcaagaatcctggctgtggaaagatacctaaaggatcaacagctcctggggatttggggttgctctggaaaactcatttgcaccactgctgtgccttggaatgctagttggagtaataaatctctggaacagatttggaatcacacgacctggatggagtgggacagagaaattaacaattacacaagcttaatacactccttaattgaagaatcgcaaaaccagcaagaaaagaatgaacaagaattattggaattagataaatgggcaagtttgtggaattggtttaacataacaaattggctgtggtatataaaattattcataatgatagtaggaggcttggtaggtttaagaatagtttttgctgtactttctatagtgaatagagttaggcagggatattcaccattatcgtttcagacccacctcccaaccccgaggggacccttgcgccttttccaaggcagccctgggtttgcgcagggacgcggctgctctgggcgtggttccgggaaacgcagcggcgccgaccctgggtctcgcacattcttcacgtccgttcgcagcgtcacccggatcttcgccgctacccttgtgggccccccggcgacgcttcctgctccgcccctaagtcgggaaggttccttgcggttcgcggcgtgccggacgtgacaaacggaagccgcacgtctcactagtaccctcgcagacggacagcgccagggagcaatggcagcgcgccgaccgcgatgggctgtggccaatagcggctgctcagcagggcgcgccgagagcagcggccgggaaggggcggtgcgggaggcggggtgtggggcggtagtgtgggccctgttcctgcccgcgcggtgttccgcattctgcaagcctccggagcgcacgtcggcagtcggctccctcgttgaccgaatcaccgacctctctccccagggggtacccagctgtctagagaattctagatcttgagacaaatggcagtattcatccacaattttaaaagaaaaggggggattggggggtacagtgcaggggaaagaatagtagacataatagcaacagacatacaaactaaagaattacaaaaacaaattacaaaaattcaaaattttcgggtttattacagggacagcagagatccactttggcgccggctcgaggggg

SEQ ID NO: 91 - protein, 279 aa, Artificial Sequence
  Synthetic Polypeptide
MVSKGEAVIKEFMRFKVHMEGSMNGHEFEIEGEGEGRPYEGTQTAKLKVTKGGPLPFSWDILSPQFMYGSRAFTKHPADIPDYYKQSFPEGFKWERVMNFEDGGAVTVTQDTSLEDGTLIYKVKLRGTNFPPDGPVMQKKCLSYETEILTVEYGLLPIGKIVEKRIECTVYSVDNNGNIYTQPVAQWHDRGEQEVFEYCLEDGSLIRATKDHKFMTVDGQMLPIDEIFERELDLMRVDNLPNGGGGSGSAQLEKELQALEKKLAQLEWENQALEKELAQ

SEQ ID NO: 92 - DNA, 9162 bp, Artificial Sequence
  Synthetic Polynucleotide
cccggggttattaatagtaatcaattacggggtcattagttcatagcccatatatggagttccgcgttacataacttacggtaaatggcccgcctggctgaccgcccaacgacccccgcccattgacgtcaataatgacgtatgttcccatagtaacgccaatagggactttccattgacgtcaatgggtggagtatttacggtaaactgcccacttggcagtacatcaagtgtatcatatgccaagtacgccccctattgacgtcaatgacggtaaatggcccgcctggcattatgcccagtacatgaccttatgggactttcctacttggcagtacatctacgtattagtcatcgctattaccatggtgatgcggttttggcagtacatcaatgggcgtggatagcggtttgactcacggggatttccaagtctccaccccattgacgtcaatgggagtttgttttggcaccaaaatcaacgggactttccaaaatgtcgtaacaactccgccccattgacgcaaatgggcggtaggcgtgtacggtgggaggtctatataagcagagctctctggctaactgtcgggatcaacaagtttgtacaaaaaagcaggctccgaattcaccggtgccgccaccatggctcaactgaagaagaaactccaggccaataagaaagaactggcacagctgaagtggaagctgcaggcactgaaaaagaagctggcacagggcggaggaggctcaggcagtatgattaagatcgctacgcggaagtacctggggaaacagaacgtctacgacataggtgtggagcgcgatcacaactttgctctgaaaaatggatttatcgccagcaactgcacaatgggctgggaagcgtccaccgagcggttgtaccccgaggacggcgtgctgaagggcgacattaagatggccctgcgcctgaaggacggcggccgctacctggcggacttcaagaccacctacaaggccaagaagcccgtgcagatgcccggcgcctacaacgtcgaccgcaagttggacatcacctcccacaacgaggactacaccgtggtggaacagtacgaacgctccgagggccgccactccaccggcggcatggacgagctgtacaagtgattaattaagaattcgacccagctttcttgtacaaagtggttggtaagcctatccctaaccctctcctcggtctcgattctacgtagtaatgagctagcagtctcgaggttaacgaattccgccccccccctaacgttactggccgaagccgcttggaataaggccggtgtgcgcttgtctatatgttattttccaccatattgccgtcttttggcaatgtgagggcccggaaacctggccctgtcttcttgacgagcattcctaggggtctttcccctctcgccaaaggaatgcaaggtctgttgaatgtcgtgaaggaagcagttcctctggaagcttcttgaagacaaacaacgtctgtagcgaccctttgcaggcagcggaaccccccacctggcgacaggtgcccctgcggccaaaagccacgtgtataagatacacctgcaaaggcggcacaaccccagtgccacgttgtgagttggatagttgtggaaagagtcaaatggctctcctcaagcgtattcaacaaggggctgaaggatgcccagaaggtaccccattgtatgggatctgatctggggcctcggtgcacatgctttacatgtgtttagtcgaggttaaaaaaacgtctaggccccccgaaccacggggacgtggttttcctttgaaaaacacgataataccatggtgagcaagggcgaggagctgttcaccggggtggtgcccatcctggtcgagctggacggcgacgtaaacggccacaagttcagcgtgtccggcgagggcgagggcgatgccacctacggcaagctgaccctgaagttcatctgcaccaccggcaagctgcccgtgccctggcccaccctcgtgaccaccctgacctacggcgtgcagtgcttcagccgctaccccgaccacatgaagcagcacgacttcttcaagtccgccatgcccgaaggctacgtccaggagcgcaccatcttcttcaaggacgacggcaactacaagacccgcgccgaggtgaagttcgagggcgacaccctggtgaaccgcatcgagctgaagggcatcgacttcaaggaggacggcaacatcctggggcacaagctggagtacaactacaacagccacaacgtctatatcatggccgacaagcagaagaacggcatcaaggtgaacttcaagatccgccacaacatcgaggacggcagcgtgcagctcgccgaccactaccagcagaacacccccatcggcgacggccccgtgctgctgcccgacaaccactacctgagcacccagtccgccctgagcaaagaccccaacgagaagcgcgatcacatggtcctgctggagttcgtgaccgccgccgggatcactctcggcatggacgagctgtacaagtaacaccggtggcgcgttaagtcgacaatcaacctctggattacaaaatttgtgaaagattgactggtattcttaactatgttgctccttttacgctatgtggatacgctgctttaatgcctttgtatcatgctattgcttcccgtatggctttcattttctcctccttgtataaatcctggttgctgtctctttatgaggagttgtggcccgttgtcaggcaacgtggcgtggtgtgcactgtgtttgctgacgcaacccccactggttggggcattgccaccacctgtcagctcctttccgggactttcgctttccccctccctattgccacggcggaactcatcgccgcctgccttgcccgctgctggacaggggctcggctgttgggcactgacaattccgtggtgttgtcggggaaatcatcgtcctttccttggctgctcgcctgtgttgccacctggattctgcgcgggacgtccttctgctacgtcccttcggccctcaatccagcggaccttccttcccgcggcctgctgccggctctgcggcctcttccgcgtcttcgccttcgccctcagacgagtcggatctccctttgggccgcctccccgcgtcgactttaagaccaatgacttacaaggcagctgtagatcttagccactttttaaaagaaaaggggggactggaagggctaattcactcccaacgaagacaagatctgctttttgcttgtactgggtctctctggttagaccagatctgagcctgggagctctctggctaactagggaacccactgcttaagcctcaataaagcttgccttgagtgcttcaagtagtgtgtgcccgtctgttgtgtgactctggtaactagagatccctcagacccttttagtcagtgtggaaaatctctagcagtacgtatagtagttcatgtcatcttattattcagtatttataacttgcaaagaaatgaatatcagagagtgagaggaacttgtttattgcagcttataatggttacaaataaagcaatagcatcacaaatttcacaaataaagcatttttttcactgcattctagttgtggtttgtccaaactcatcaatgtatcttatcatgtctggctctagctatcccgcccctaactccgcccatcccgcccctaactccgcccagttccgcccattctccgccccatggctgactaattttttttatttatgcagaggccgaggccgcctcggcctctgagctattccagaagtagtgaggaggcttttttggaggcctagggacgtacccaattcgccctatagtgagtcgtattacgcgcgctcactggccgtcgttttacaacgtcgtgactgggaaaaccctggcgttacccaacttaatcgccttgcagcacatccccctttcgccagctggcgtaatagcgaagaggcccgcaccgatcgcccttcccaacagttgcgcagcctgaatggcgaatgggacgcgccctgtagcggcgcattaagcgcggcgggtgtggtggttacgcgcagcgtgaccgctacacttgccagcgccctagcgcccgctcctttcgctttcttcccttcctttctcgccacgttcgccggctttccccgtcaagctctaaatcgggggctccctttagggttccgatttagtgctttacggcacctcgaccccaaaaaacttgattagggtgatggttcacgtagtgggccatcgccctgatagacggtttttcgccctttgacgttggagtccacgttctttaatagtggactcttgttccaaactggaacaacactcaaccctatctcggtctattcttttgatttataagggattttgccgatttcggcctattggttaaaaaatgagctgatttaacaaaaatttaacgcgaattttaacaaaatattaacgcttacaatttaggtggcacttttcggggaaatgtgcgcggaacccctatttgtttatttttctaaatacattcaaatatgtatccgctcatgagacaataaccctgataaatgcttcaataatattgaaaaaggaagagtatgagtattcaacatttccgtgtcgcccttattcccttttttgcggcattttgccttcctgtttttgctcacccagaaacgctggtgaaagtaaaagatgctgaagatcagttgggtgcacgagtgggttacatcgaactggatctcaacagcggtaagatccttgagagttttcgccccgaagaacgttttccaatgatgagcacttttaaagttctgctatgtggcgcggtattatcccgtattgacgccgggcaagagcaactcggtcgccgcatacactattctcagaatgacttggttgagtactcaccagtcacagaaaagcatcttacggatggcatgacagtaagagaattatgcagtgctgccataaccatgagtgataacactgcggccaacttacttctgacaacgatcggaggaccgaaggagctaaccgcttttttgcacaacatgggggatcatgtaactcgccttgatcgttgggaaccggagctgaatgaagccataccaaacgacgagcgtgacaccacgatgcctgtagcaatggcaacaacgttgcgcaaactattaactggcgaactacttactctagcttcccggcaacaattaatagactggatggaggcggataaagttgcaggaccacttctgcgctcggcccttccggctggctggtttattgctgataaatctggagccggtgagcgtgggtctcgcggtatcattgcagcactggggccagatggtaagccctcccgtatcgtagttatctacacgacggggagtcaggcaactatggatgaacgaaatagacagatcgctgagataggtgcctcactgattaagcattggtaactgtcagaccaagtttactcatatatactttagattgatttaaaacttcatttttaatttaaaaggatctaggtgaagatcctttttgataatctcatgaccaaaatcccttaacgtgagttttcgttccactgagcgtcagaccccgtagaaaagatcaaaggatcttcttgagatcctttttttctgcgcgtaatctgctgcttgcaaacaaaaaaaccaccgctaccagcggtggtttgtttgccggatcaagagctaccaactctttttccgaaggtaactggcttcagcagagcgcagataccaaatactgttcttctagtgtagccgtagttaggccaccacttcaagaactctgtagcaccgcctacatacctcgctctgctaatcctgttaccagtggctgctgccagtggcgataagtcgtgtcttaccgggttggactcaagacgatagttaccggataaggcgcagcggtcgggctgaacggggggttcgtgcacacagcccagcttggagcgaacgacctacaccgaactgagatacctacagcgtgagctatgagaaagcgccacgcttcccgaagggagaaaggcggacaggtatccggtaagcggcagggtcggaacaggagagcgcacgagggagcttccagggggaaacgcctggtatctttatagtcctgtcgggtttcgccacctctgacttgagcgtcgatttttgtgatgctcgtcaggggggcggagcctatggaaaaacgccagcaacgcggcctttttacggttcctggccttttgctggccttttgctcacatgttctttcctgcgttatcccctgattctgtggataaccgtattaccgcctttgagtgagctgataccgctcgccgcagccgaacgaccgagcgcagcgagtcagtgagcgaggaagcggaagagcgcccaatacgcaaaccgcctctccccgcgcgttggccgattcattaatgcagctggcacgacaggtttcccgactggaaagcgggcagtgagcgcaacgcaattaatgtgagttagctcactcattaggcaccccaggctttacactttatgcttccggctcgtatgttgtgtggaattgtgagcggataacaatttcacacaggaaacagctatgaccatgattacgccaagcgcgcaattaaccctcactaaagggaacaaaagctggagctgcaagcttaatgtagtcttatgcaatactcttgtagtcttgcaacatggtaacgatgagttagcaacatgccttacaaggagagaaaaagcaccgtgcatgccgattggtggaagtaaggtggtacgatcgtgccttattaggaaggcaacagacgggtctgacatggattggacgaaccactgaattgccgcattgcagagatattgtatttaagtgcctagctcgatacataaacgggtctctctggttagaccagatctgagcctgggagctctctggctaactagggaacccactgcttaagcctcaataaagcttgccttgagtgcttcaagtagtgtgtgcccgtctgttgtgtgactctggtaactagagatccctcagacccttttagtcagtgtggaaaatctctagcagtggcgcccgaacagggacttgaaagcgaaagggaaaccagaggagctctctcgacgcaggactcggcttgctgaagcgcgcacggcaagaggcgaggggcggcgactggtgagtacgccaaaaattttgactagcggaggctagaaggagagagatgggtgcgagagcgtcagtattaagcgggggagaattagatcgcgatgggaaaaaattcggttaaggccagggggaaagaaaaaatataaattaaaacatatagtatgggcaagcagggagctagaacgattcgcagttaatcctggcctgttagaaacatcagaaggctgtagacaaatactgggacagctacaaccatcccttcagacaggatcagaagaacttagatcattatataatacagtagcaaccctctattgtgtgcatcaaaggatagagataaaagacaccaaggaagctttagacaagatagaggaagagcaaaacaaaagtaagaccaccgcacagcaagcggccgctgatcttcagacctggaggaggagatatgagggacaattggagaagtgaattatataaatataaagtagtaaaaattgaaccattaggagtagcacccaccaaggcaaagagaagagtggtgcagagagaaaaaagagcagtgggaataggagctttgttccttgggttcttgggagcagcaggaagcactatgggcgcagcgtcaatgacgctgacggtacaggccagacaattattgtctggtatagtgcagcagcagaacaatttgctgagggctattgaggcgcaacagcatctgttgcaactcacagtctggggcatcaagcagctccaggcaagaatcctggctgtggaaagatacctaaaggatcaacagctcctggggatttggggttgctctggaaaactcatttgcaccactgctgtgccttggaatgctagttggagtaataaatctctggaacagatttggaatcacacgacctggatggagtgggacagagaaattaacaattacacaagcttaatacactccttaattgaagaatcgcaaaaccagcaagaaaagaatgaacaagaattattggaattagataaatgggcaagtttgtggaattggtttaacataacaaattggctgtggtatataaaattattcataatgatagtaggaggcttggtaggtttaagaatagtttttgctgtactttctatagtgaatagagttaggcagggatattcaccattatcgtttcagacccacctcccaaccccgaggggacccttgcgccttttccaaggcagccctgggtttgcgcagggacgcggctgctctgggcgtggttccgggaaacgcagcggcgccgaccctgggtctcgcacattcttcacgtccgttcgcagcgtcacccggatcttcgccgctacccttgtgggccccccggcgacgcttcctgctccgcccctaagtcgggaaggttccttgcggttcgcggcgtgccggacgtgacaaacggaagccgcacgtctcactagtaccctcgcagacggacagcgccagggagcaatggcagcgcgccgaccgcgatgggctgtggccaatagcggctgctcagcagggcgcgccgagagcagcggccgggaaggggcggtgcgggaggcggggtgtggggcggtagtgtgggccctgttcctgcccgcgcggtgttccgcattctgcaagcctccggagcgcacgtcggcagtcggctccctcgttgaccgaatcaccgacctctctccccagggggtacccagctgtctagagaattctagatcttgagacaaatggcagtattcatccacaattttaaaagaaaaggggggattggggggtacagtgcaggggaaagaatagtagacataatagcaacagacatacaaactaaagaattacaaaaacaaattacaaaaattcaaaattttcgggtttattacagggacagcagagatccactttggcgccggctcgaggggg

SEQ ID NO: 93 - protein, 167 aa, Artificial Sequence
  Synthetic Polypeptide
MAQLKKKLQANKKELAQLKWKLQALKKKLAQGGGGSGSMIKIATRKYLGKQNVYDIGVERDHNFALKNGFIASNCTMGWEASTERLYPEDGVLKGDIKMALRLKDGGRYLADFKTTYKAKKPVQMPGAYNVDRKLDITSHNEDYTVVEQYERSEGRHSTGGMDELYK

SEQ ID NO: 94 - DNA, 9555 bp, Artificial Sequence
  Synthetic Polynucleotide
cccggggttattaatagtaatcaattacggggtcattagttcatagcccatatatggagttccgcgttacataacttacggtaaatggcccgcctggctgaccgcccaacgacccccgcccattgacgtcaataatgacgtatgttcccatagtaacgccaatagggactttccattgacgtcaatgggtggagtatttacggtaaactgcccacttggcagtacatcaagtgtatcatatgccaagtacgccccctattgacgtcaatgacggtaaatggcccgcctggcattatgcccagtacatgaccttatgggactttcctacttggcagtacatctacgtattagtcatcgctattaccatggtgatgcggttttggcagtacatcaatgggcgtggatagcggtttgactcacggggatttccaagtctccaccccattgacgtcaatgggagtttgttttggcaccaaaatcaacgggactttccaaaatgtcgtaacaactccgccccattgacgcaaatgggcggtaggcgtgtacggtgggaggtctatataagcagagctctctggctaactgtcgggatcaacaagtttgtacaaaaaagcaggctccgaattcaccggtgccgccaccatggtgagcaagggcgaggcagtgatcaaggagttcatgcggttcaaggtgcacatggagggctccatgaacggccacgagttcgagatcgagggcgagggcgagggccgcccctacgagggcacccagaccgccaagctgaaggtgaccaagggtggccccctgcccttctcctgggacatcctgtcccctcagttcatgtacggctccagggccttcaccaagcaccccgccgacatccccgactactataagcagtccttccccgagggcttcaagtgggagcgcgtgatgaacttcgaggacggcggcgccgtgaccgtgacccaggacacctccctggaggacggcaccctgatctacaaggtgaagctccgcggcaccaacttccctcctgacggccccgtaatgcagaagaagacaatgggctgggaagcgtccaccgagcggttgtaccccgaggacggcgtgctgaagggcgacattaagtgcctttcatacgagaccgagatcctgactgtcgagtacggattgcttcctatcggcaaaatcgtggagaagaggattgaatgtaccgtctattcagtcgataataatgggaacatctacacacagcccgtggctcaatggcacgacagaggagagcaggaagtttttgaatactgtctcgaggacggatccctcatccgcgctactaaagatcataagtttatgaccgtggacggccagatgctgccaattgacgaaatttttgaacgagagctggatctgatgagagtcgacaaccttccaaacggtggaggggggtcaggctctgcgcagctggaaaaggagcttcaagccctcgaaaaaaagttggcccagctcgagtgggagaaccaggctctggagaaagaactggcccagtgattaattaagaattcgacccagctttcttgtacaaagtggttggtaagcctatccctaaccctctcctcggtctcgattctacgtagtaatgagctagcagtctcgaggttaacgaattccgccccccccctaacgttactggccgaagccgcttggaataaggccggtgtgcgcttgtctatatgttattttccaccatattgccgtcttttggcaatgtgagggcccggaaacctggccctgtcttcttgacgagcattcctaggggtctttcccctctcgccaaaggaatgcaaggtctgttgaatgtcgtgaaggaagcagttcctctggaagcttcttgaagacaaacaacgtctgtagcgaccctttgcaggcagcggaaccccccacctggcgacaggtgcccctgcggccaaaagccacgtgtataagatacacctgcaaaggcggcacaaccccagtgccacgttgtgagttggatagttgtggaaagagtcaaatggctctcctcaagcgtattcaacaaggggctgaaggatgcccagaaggtaccccattgtatgggatctgatctggggcctcggtgcacatgctttacatgtgtttagtcgaggttaaaaaaacgtctaggccccccgaaccacggggacgtggttttcctttgaaaaacacgataataccatggccatgagcgagctgattaaggagaacatgcacatgaagctgtacatggagggcaccgtggacaaccatcacttcaagtgcacatccgagggcgaaggcaagccctacgagggcacccagaccatgagaatcaaggtggtcgagggcggccctctccccttcgccttcgacatcctggctactagcttcctctacggcagcaagaccttcatcaaccacacccagggcatccccgacttcttcaagcagtccttccctgagggcttcacatgggagagagtcaccacatacgaagacgggggcgtgctgaccgctacccaggacaccagcctccaggacggctgcctcatctacaacgtcaagatcagaggggtgaacttcacatccaacggccctgtgatgcagaagaaaacactcggctgggaggccttcaccgagacgctgtaccccgctgacggcggcctggaaggcagaaacgacatggccctgaagctcgtgggcgggagccatctgatcgcaaacatcaagaccacatatagatccaagaaacccgctaagaacctcaagatgcctggcgtctactatgtggactacagactggaaagaatcaaggaggccaacaacgagacctacgtcgagcagcacgaggtggcagtggccagatactgcgacctccctagcaaactggggcacaagcttaattaacaccggtggcgcgttaagtcgacaatcaacctctggattacaaaatttgtgaaagattgactggtattcttaactatgttgctccttttacgctatgtggatacgctgctttaatgcctttgtatcatgctattgcttcccgtatggctttcattttctcctccttgtataaatcctggttgctgtctctttatgaggagttgtggcccgttgtcaggcaacgtggcgtggtgtgcactgtgtttgctgacgcaacccccactggttggggcattgccaccacctgtcagctcctttccgggactttcgctttccccctccctattgccacggcggaactcatcgccgcctgccttgcccgctgctggacaggggctcggctgttgggcactgacaattccgtggtgttgtcggggaaatcatcgtcctttccttggctgctcgcctgtgttgccacctggattctgcgcgggacgtccttctgctacgtcccttcggccctcaatccagcggaccttccttcccgcggcctgctgccggctctgcggcctcttccgcgtcttcgccttcgccctcagacgagtcggatctccctttgggccgcctccccgcgtcgactttaagaccaatgacttacaaggcagctgtagatcttagccactttttaaaagaaaaggggggactggaagggctaattcactcccaacgaagacaagatctgctttttgcttgtactgggtctctctggttagaccagatctgagcctgggagctctctggctaactagggaacccactgcttaagcctcaataaagcttgccttgagtgcttcaagtagtgtgtgcccgtctgttgtgtgactctggtaactagagatccctcagacccttttagtcagtgtggaaaatctctagcagtacgtatagtagttcatgtcatcttattattcagtatttataacttgcaaagaaatgaatatcagagagtgagaggaacttgtttattgcagcttataatggttacaaataaagcaatagcatcacaaatttcacaaataaagcatttttttcactgcattctagttgtggtttgtccaaactcatcaatgtatcttatcatgtctggctctagctatcccgcccctaactccgcccatcccgcccctaactccgcccagttccgcccattctccgccccatggctgactaattttttttatttatgcagaggccgaggccgcctcggcctctgagctattccagaagtagtgaggaggcttttttggaggcctagggacgtacccaattcgccctatagtgagtcgtattacgcgcgctcactggccgtcgttttacaacgtcgtgactgggaaaaccctggcgttacccaacttaatcgccttgcagcacatccccctttcgccagctggcgtaatagcgaagaggcccgcaccgatcgcccttcccaacagttgcgcagcctgaatggcgaatgggacgcgccctgtagcggcgcattaagcgcggcgggtgtggtggttacgcgcagcgtgaccgctacacttgccagcgccctagcgcccgctcctttcgctttcttcccttcctttctcgccacgttcgccggctttccccgtcaagctctaaatcgggggctccctttagggttccgatttagtgctttacggcacctcgaccccaaaaaacttgattagggtgatggttcacgtagtgggccatcgccctgatagacggtttttcgccctttgacgttggagtccacgttctttaatagtggactcttgttccaaactggaacaacactcaaccctatctcggtctattcttttgatttataagggattttgccgatttcggcctattggttaaaaaatgagctgatttaacaaaaatttaacgcgaattttaacaaaatattaacgcttacaatttaggtggcacttttcggggaaatgtgcgcggaacccctatttgtttatttttctaaatacattcaaatatgtatccgctcatgagacaataaccctgataaatgcttcaataatattgaaaaaggaagagtatgagtattcaacatttccgtgtcgcccttattcccttttttgcggcattttgccttcctgtttttgctcacccagaaacgctggtgaaagtaaaagatgctgaagatcagttgggtgcacgagtgggttacatcgaactggatctcaacagcggtaagatccttgagagttttcgccccgaagaacgttttccaatgatgagcacttttaaagttctgctatgtggcgcggtattatcccgtattgacgccgggcaagagcaactcggtcgccgcatacactattctcagaatgacttggttgagtactcaccagtcacagaaaagcatcttacggatggcatgacagtaagagaattatgcagtgctgccataaccatgagtgataacactgcggccaacttacttctgacaacgatcggaggaccgaaggagctaaccgcttttttgcacaacatgggggatcatgtaactcgccttgatcgttgggaaccggagctgaatgaagccataccaaacgacgagcgtgacaccacgatgcctgtagcaatggcaacaacgttgcgcaaactattaactggcgaactacttactctagcttcccggcaacaattaatagactggatggaggcggataaagttgcaggaccacttctgcgctcggcccttccggctggctggtttattgctgataaatctggagccggtgagcgtgggtctcgcggtatcattgcagcactggggccagatggtaagccctcccgtatcgtagttatctacacgacggggagtcaggcaactatggatgaacgaaatagacagatcgctgagataggtgcctcactgattaagcattggtaactgtcagaccaagtttactcatatatactttagattgatttaaaacttcatttttaatttaaaaggatctaggtgaagatcctttttgataatctcatgaccaaaatcccttaacgtgagttttcgttccactgagcgtcagaccccgtagaaaagatcaaaggatcttcttgagatcctttttttctgcgcgtaatctgctgcttgcaaacaaaaaaaccaccgctaccagcggtggtttgtttgccggatcaagagctaccaactctttttccgaaggtaactggcttcagcagagcgcagataccaaatactgttcttctagtgtagccgtagttaggccaccacttcaagaactctgtagcaccgcctacatacctcgctctgctaatcctgttaccagtggctgctgccagtggcgataagtcgtgtcttaccgggttggactcaagacgatagttaccggataaggcgcagcggtcgggctgaacggggggttcgtgcacacagcccagcttggagcgaacgacctacaccgaactgagatacctacagcgtgagctatgagaaagcgccacgcttcccgaagggagaaaggcggacaggtatccggtaagcggcagggtcggaacaggagagcgcacgagggagcttccagggggaaacgcctggtatctttatagtcctgtcgggtttcgccacctctgacttgagcgtcgatttttgtgatgctcgtcaggggggcggagcctatggaaaaacgccagcaacgcggcctttttacggttcctggccttttgctggccttttgctcacatgttctttcctgcgttatcccctgattctgtggataaccgtattaccgcctttgagtgagctgataccgctcgccgcagccgaacgaccgagcgcagcgagtcagtgagcgaggaagcggaagagcgcccaatacgcaaaccgcctctccccgcgcgttggccgattcattaatgcagctggcacgacaggtttcccgactggaaagcgggcagtgagcgcaacgcaattaatgtgagttagctcactcattaggcaccccaggctttacactttatgcttccggctcgtatgttgtgtggaattgtgagcggataacaatttcacacaggaaacagctatgaccatgattacgccaagcgcgcaattaaccctcactaaagggaacaaaagctggagctgcaagcttaatgtagtcttatgcaatactcttgtagtcttgcaacatggtaacgatgagttagcaacatgccttacaaggagagaaaaagcaccgtgcatgccgattggtggaagtaaggtggtacgatcgtgccttattaggaaggcaacagacgggtctgacatggattggacgaaccactgaattgccgcattgcagagatattgtatttaagtgcctagctcgatacataaacgggtctctctggttagaccagatctgagcctgggagctctctggctaactagggaacccactgcttaagcctcaataaagcttgccttgagtgcttcaagtagtgtgtgcccgtctgttgtgtgactctggtaactagagatccctcagacccttttagtcagtgtggaaaatctctagcagtggcgcccgaacagggacttgaaagcgaaagggaaaccagaggagctctctcgacgcaggactcggcttgctgaagcgcgcacggcaagaggcgaggggcggcgactggtgagtacgccaaaaattttgactagcggaggctagaaggagagagatgggtgcgagagcgtcagtattaagcgggggagaattagatcgcgatgggaaaaaattcggttaaggccagggggaaagaaaaaatataaattaaaacatatagtatgggcaagcagggagctagaacgattcgcagttaatcctggcctgttagaaacatcagaaggctgtagacaaatactgggacagctacaaccatcccttcagacaggatcagaagaacttagatcattatataatacagtagcaaccctctattgtgtgcatcaaaggatagagataaaagacaccaaggaagctttagacaagatagaggaagagcaaaacaaaagtaagaccaccgcacagcaagcggccgctgatcttcagacctggaggaggagatatgagggacaattggagaagtgaattatataaatataaagtagtaaaaattgaaccattaggagtagcacccaccaaggcaaagagaagagtggtgcagagagaaaaaagagcagtgggaataggagctttgttccttgggttcttgggagcagcaggaagcactatgggcgcagcgtcaatgacgctgacggtacaggccagacaattattgtctggtatagtgcagcagcagaacaatttgctgagggctattgaggcgcaacagcatctgttgcaactcacagtctggggcatcaagcagctccaggcaagaatcctggctgtggaaagatacctaaaggatcaacagctcctggggatttggggttgctctggaaaactcatttgcaccactgctgtgccttggaatgctagttggagtaataaatctctggaacagatttggaatcacacgacctggatggagtgggacagagaaattaacaattacacaagcttaatacactccttaattgaagaatcgcaaaaccagcaagaaaagaatgaacaagaattattggaattagataaatgggcaagtttgtggaattggtttaacataacaaattggctgtggtatataaaattattcataatgatagtaggaggcttggtaggtttaagaatagtttttgctgtactttctatagtgaatagagttaggcagggatattcaccattatcgtttcagacccacctcccaaccccgaggggacccttgcgccttttccaaggcagccctgggtttgcgcagggacgcggctgctctgggcgtggttccgggaaacgcagcggcgccgaccctgggtctcgcacattcttcacgtccgttcgcagcgtcacccggatcttcgccgctacccttgtgggccccccggcgacgcttcctgctccgcccctaagtcgggaaggttccttgcggttcgcggcgtgccggacgtgacaaacggaagccgcacgtctcactagtaccctcgcagacggacagcgccagggagcaatggcagcgcgccgaccgcgatgggctgtggccaatagcggctgctcagcagggcgcgccgagagcagcggccgggaaggggcggtgcgggaggcggggtgtggggcggtagtgtgggccctgttcctgcccgcgcggtgttccgcattctgcaagcctccggagcgcacgtcggcagtcggctccctcgttgaccgaatcaccgacctctctccccagggggtacccagctgtctagagaattctagatcttgagacaaatggcagtattcatccacaattttaaaagaaaaggggggattggggggtacagtgcaggggaaagaatagtagacataatagcaacagacatacaaactaaagaattacaaaaacaaattacaaaaattcaaaattttcgggtttattacagggacagcagagatccactttggcgccggctcgaggggg

SEQ ID NO: 95 - protein, 302 aa, Artificial Sequence
  Synthetic Polypeptide
MVSKGEAVIKEFMRFKVHMEGSMNGHEFEIEGEGEGRPYEGTQTAKLKVTKGGPLPFSWDILSPQFMYGSRAFTKHPADIPDYYKQSFPEGFKWERVMNFEDGGAVTVTQDTSLEDGTLIYKVKLRGTNFPPDGPVMQKKTMGWEASTERLYPEDGVLKGDIKCLSYETEILTVEYGLLPIGKIVEKRIECTVYSVDNNGNIYTQPVAQWHDRGEQEVFEYCLEDGSLIRATKDHKFMTVDGQMLPIDEIFERELDLMRVDNLPNGGGGSGSAQLEKELQALEKKLAQLEWENQALEKELAQ

SEQ ID NO: 96 - DNA, 9093 bp, Artificial Sequence
  Synthetic Polynucleotide
cccggggttattaatagtaatcaattacggggtcattagttcatagcccatatatggagttccgcgttacataacttacggtaaatggcccgcctggctgaccgcccaacgacccccgcccattgacgtcaataatgacgtatgttcccatagtaacgccaatagggactttccattgacgtcaatgggtggagtatttacggtaaactgcccacttggcagtacatcaagtgtatcatatgccaagtacgccccctattgacgtcaatgacggtaaatggcccgcctggcattatgcccagtacatgaccttatgggactttcctacttggcagtacatctacgtattagtcatcgctattaccatggtgatgcggttttggcagtacatcaatgggcgtggatagcggtttgactcacggggatttccaagtctccaccccattgacgtcaatgggagtttgttttggcaccaaaatcaacgggactttccaaaatgtcgtaacaactccgccccattgacgcaaatgggcggtaggcgtgtacggtgggaggtctatataagcagagctctctggctaactgtcgggatcaacaagtttgtacaaaaaagcaggctccgaattcaccggtgccgccaccatggctcaactgaagaagaaactccaggccaataagaaagaactggcacagctgaagtggaagctgcaggcactgaaaaagaagctggcacagggcggaggaggctcaggcagtatgattaagatcgctacgcggaagtacctggggaaacagaacgtctacgacataggtgtggagcgcgatcacaactttgctctgaaaaatggatttatcgccagcaactgcatggccctgcgcctgaaggacggcggccgctacctggcggacttcaagaccacctacaaggccaagaagcccgtgcagatgcccggcgcctacaacgtcgaccgcaagttggacatcacctcccacaacgaggactacaccgtggtggaacagtacgaacgctccgagggccgccactccaccggcggcatggacgagctgtacaagtgattaattaagaattcgacccagctttcttgtacaaagtggttggtaagcctatccctaaccctctcctcggtctcgattctacgtagtaatgagctagcagtctcgaggttaacgaattccgccccccccctaacgttactggccgaagccgcttggaataaggccggtgtgcgcttgtctatatgttattttccaccatattgccgtcttttggcaatgtgagggcccggaaacctggccctgtcttcttgacgagcattcctaggggtctttcccctctcgccaaaggaatgcaaggtctgttgaatgtcgtgaaggaagcagttcctctggaagcttcttgaagacaaacaacgtctgtagcgaccctttgcaggcagcggaaccccccacctggcgacaggtgcccctgcggccaaaagccacgtgtataagatacacctgcaaaggcggcacaaccccagtgccacgttgtgagttggatagttgtggaaagagtcaaatggctctcctcaagcgtattcaacaaggggctgaaggatgcccagaaggtaccccattgtatgggatctgatctggggcctcggtgcacatgctttacatgtgtttagtcgaggttaaaaaaacgtctaggccccccgaaccacggggacgtggttttcctttgaaaaacacgataataccatggtgagcaagggcgaggagctgttcaccggggtggtgcccatcctggtcgagctggacggcgacgtaaacggccacaagttcagcgtgtccggcgagggcgagggcgatgccacctacggcaagctgaccctgaagttcatctgcaccaccggcaagctgcccgtgccctggcccaccctcgtgaccaccctgacctacggcgtgcagtgcttcagccgctaccccgaccacatgaagcagcacgacttcttcaagtccgccatgcccgaaggctacgtccaggagcgcaccatcttcttcaaggacgacggcaactacaagacccgcgccgaggtgaagttcgagggcgacaccctggtgaaccgcatcgagctgaagggcatcgacttcaaggaggacggcaacatcctggggcacaagctggagtacaactacaacagccacaacgtctatatcatggccgacaagcagaagaacggcatcaaggtgaacttcaagatccgccacaacatcgaggacggcagcgtgcagctcgccgaccactaccagcagaacacccccatcggcgacggccccgtgctgctgcccgacaaccactacctgagcacccagtccgccctgagcaaagaccccaacgagaagcgcgatcacatggtcctgctggagttcgtgaccgccgccgggatcactctcggcatggacgagctgtacaagtaacaccggtggcgcgttaagtcgacaatcaacctctggattacaaaatttgtgaaagattgactggtattcttaactatgttgctccttttacgctatgtggatacgctgctttaatgcctttgtatcatgctattgcttcccgtatggctttcattttctcctccttgtataaatcctggttgctgtctctttatgaggagttgtggcccgttgtcaggcaacgtggcgtggtgtgcactgtgtttgctgacgcaacccccactggttggggcattgccaccacctgtcagctcctttccgggactttcgctttccccctccctattgccacggcggaactcatcgccgcctgccttgcccgctgctggacaggggctcggctgttgggcactgacaattccgtggtgttgtcggggaaatcatcgtcctttccttggctgctcgcctgtgttgccacctggattctgcgcgggacgtccttctgctacgtcccttcggccctcaatccagcggaccttccttcccgcggcctgctgccggctctgcggcctcttccgcgtcttcgccttcgccctcagacgagtcggatctccctttgggccgcctccccgcgtcgactttaagaccaatgacttacaaggcagctgtagatcttagccactttttaaaagaaaaggggggactggaagggctaattcactcccaacgaagacaagatctgctttttgcttgtactgggtctctctggttagaccagatctgagcctgggagctctctggctaactagggaacccactgcttaagcctcaataaagcttgccttgagtgcttcaagtagtgtgtgcccgtctgttgtgtgactctggtaactagagatccctcagacccttttagtcagtgtggaaaatctctagcagtacgtatagtagttcatgtcatcttattattcagtatttataacttgcaaagaaatgaatatcagagagtgagaggaacttgtttattgcagcttataatggttacaaataaagcaatagcatcacaaatttcacaaataaagcatttttttcactgcattctagttgtggtttgtccaaactcatcaatgtatcttatcatgtctggctctagctatcccgcccctaactccgcccatcccgcccctaactccgcccagttccgcccattctccgccccatggctgactaattttttttatttatgcagaggccgaggccgcctcggcctctgagctattccagaagtagtgaggaggcttttttggaggcctagggacgtacccaattcgccctatagtgagtcgtattacgcgcgctcactggccgtcgttttacaacgtcgtgactgggaaaaccctggcgttacccaacttaatcgccttgcagcacatccccctttcgccagctggcgtaatagcgaagaggcccgcaccgatcgcccttcccaacagttgcgcagcctgaatggcgaatgggacgcgccctgtagcggcgcattaagcgcggcgggtgtggtggttacgcgcagcgtgaccgctacacttgccagcgccctagcgcccgctcctttcgctttcttcccttcctttctcgccacgttcgccggctttccccgtcaagctctaaatcgggggctccctttagggttccgatttagtgctttacggcacctcgaccccaaaaaacttgattagggtgatggttcacgtagtgggccatcgccctgatagacggtttttcgccctttgacgttggagtccacgttctttaatagtggactcttgttccaaactggaacaacactcaaccctatctcggtctattcttttgatttataagggattttgccgatttcggcctattggttaaaaaatgagctgatttaacaaaaatttaacgcgaattttaacaaaatattaacgcttacaatttaggtggcacttttcggggaaatgtgcgcggaacccctatttgtttatttttctaaatacattcaaatatgtatccgctcatgagacaataaccctgataaatgcttcaataatattgaaaaaggaagagtatgagtattcaacatttccgtgtcgcccttattcccttttttgcggcattttgccttcctgtttttgctcacccagaaacgctggtgaaagtaaaagatgctgaagatcagttgggtgcacgagtgggttacatcgaactggatctcaacagcggtaagatccttgagagttttcgccccgaagaacgttttccaatgatgagcacttttaaagttctgctatgtggcgcggtattatcccgtattgacgccgggcaagagcaactcggtcgccgcatacactattctcagaatgacttggttgagtactcaccagtcacagaaaagcatcttacggatggcatgacagtaagagaattatgcagtgctgccataaccatgagtgataacactgcggccaacttacttctgacaacgatcggaggaccgaaggagctaaccgcttttttgcacaacatgggggatcatgtaactcgccttgatcgttgggaaccggagctgaatgaagccataccaaacgacgagcgtgacaccacgatgcctgtagcaatggcaacaacgttgcgcaaactattaactggcgaactacttactctagcttcccggcaacaattaatagactggatggaggcggataaagttgcaggaccacttctgcgctcggcccttccggctggctggtttattgctgataaatctggagccggtgagcgtgggtctcgcggtatcattgcagcactggggccagatggtaagccctcccgtatcgtagttatctacacgacggggagtcaggcaactatggatgaacgaaatagacagatcgctgagataggtgcctcactgattaagcattggtaactgtcagaccaagtttactcatatatactttagattgatttaaaacttcatttttaatttaaaaggatctaggtgaagatcctttttgataatctcatgaccaaaatcccttaacgtgagttttcgttccactgagcgtcagaccccgtagaaaagatcaaaggatcttcttgagatcctttttttctgcgcgtaatctgctgcttgcaaacaaaaaaaccaccgctaccagcggtggtttgtttgccggatcaagagctaccaactctttttccgaaggtaactggcttcagcagagcgcagataccaaatactgttcttctagtgtagccgtagttaggccaccacttcaagaactctgtagcaccgcctacatacctcgctctgctaatcctgttaccagtggctgctgccagtggcgataagtcgtgtcttaccgggttggactcaagacgatagttaccggataaggcgcagcggtcgggctgaacggggggttcgtgcacacagcccagcttggagcgaacgacctacaccgaactgagatacctacagcgtgagctatgagaaagcgccacgcttcccgaagggagaaaggcggacaggtatccggtaagcggcagggtcggaacaggagagcgcacgagggagcttccagggggaaacgcctggtatctttatagtcctgtcgggtttcgccacctctgacttgagcgtcgatttttgtgatgctcgtcaggggggcggagcctatggaaaaacgccagcaacgcggcctttttacggttcctggccttttgctggccttttgctcacatgttctttcctgcgttatcccctgattctgtggataaccgtattaccgcctttgagtgagctgataccgctcgccgcagccgaacgaccgagcgcagcgagtcagtgagcgaggaagcggaagagcgcccaatacgcaaaccgcctctccccgcgcgttggccgattcattaatgcagctggcacgacaggtttcccgactggaaagcgggcagtgagcgcaacgcaattaatgtgagttagctcactcattaggcaccccaggctttacactttatgcttccggctcgtatgttgtgtggaattgtgagcggataacaatttcacacaggaaacagctatgaccatgattacgccaagcgcgcaattaaccctcactaaagggaacaaaagctggagctgcaagcttaatgtagtcttatgcaatactcttgtagtcttgcaacatggtaacgatgagttagcaacatgccttacaaggagagaaaaagcaccgtgcatgccgattggtggaagtaaggtggtacgatcgtgccttattaggaaggcaacagacgggtctgacatggattggacgaaccactgaattgccgcattgcagagatattgtatttaagtgcctagctcgatacataaacgggtctctctggttagaccagatctgagcctgggagctctctggctaactagggaacccactgcttaagcctcaataaagcttgccttgagtgcttcaagtagtgtgtgcccgtctgttgtgtgactctggtaactagagatccctcagacccttttagtcagtgtggaaaatctctagcagtggcgcccgaacagggacttgaaagcgaaagggaaaccagaggagctctctcgacgcaggactcggcttgctgaagcgcgcacggcaagaggcgaggggcggcgactggtgagtacgccaaaaattttgactagcggaggctagaaggagagagatgggtgcgagagcgtcagtattaagcgggggagaattagatcgcgatgggaaaaaattcggttaaggccagggggaaagaaaaaatataaattaaaacatatagtatgggcaagcagggagctagaacgattcgcagttaatcctggcctgttagaaacatcagaaggctgtagacaaatactgggacagctacaaccatcccttcagacaggatcagaagaacttagatcattatataatacagtagcaaccctctattgtgtgcatcaaaggatagagataaaagacaccaaggaagctttagacaagatagaggaagagcaaaacaaaagtaagaccaccgcacagcaagcggccgctgatcttcagacctggaggaggagatatgagggacaattggagaagtgaattatataaatataaagtagtaaaaattgaaccattaggagtagcacccaccaaggcaaagagaagagtggtgcagagagaaaaaagagcagtgggaataggagctttgttccttgggttcttgggagcagcaggaagcactatgggcgcagcgtcaatgacgctgacggtacaggccagacaattattgtctggtatagtgcagcagcagaacaatttgctgagggctattgaggcgcaacagcatctgttgcaactcacagtctggggcatcaagcagctccaggcaagaatcctggctgtggaaagatacctaaaggatcaacagctcctggggatttggggttgctctggaaaactcatttgcaccactgctgtgccttggaatgctagttggagtaataaatctctggaacagatttggaatcacacgacctggatggagtgggacagagaaattaacaattacacaagcttaatacactccttaattgaagaatcgcaaaaccagcaagaaaagaatgaacaagaattattggaattagataaatgggcaagtttgtggaattggtttaacataacaaattggctgtggtatataaaattattcataatgatagtaggaggcttggtaggtttaagaatagtttttgctgtactttctatagtgaatagagttaggcagggatattcaccattatcgtttcagacccacctcccaaccccgaggggacccttgcgccttttccaaggcagccctgggtttgcgcagggacgcggctgctctgggcgtggttccgggaaacgcagcggcgccgaccctgggtctcgcacattcttcacgtccgttcgcagcgtcacccggatcttcgccgctacccttgtgggccccccggcgacgcttcctgctccgcccctaagtcgggaaggttccttgcggttcgcggcgtgccggacgtgacaaacggaagccgcacgtctcactagtaccctcgcagacggacagcgccagggagcaatggcagcgcgccgaccgcgatgggctgtggccaatagcggctgctcagcagggcgcgccgagagcagcggccgggaaggggcggtgcgggaggcggggtgtggggcggtagtgtgggccctgttcctgcccgcgcggtgttccgcattctgcaagcctccggagcgcacgtcggcagtcggctccctcgttgaccgaatcaccgacctctctccccagggggtacccagctgtctagagaattctagatcttgagacaaatggcagtattcatccacaattttaaaagaaaaggggggattggggggtacagtgcaggggaaagaatagtagacataatagcaacagacatacaaactaaagaattacaaaaacaaattacaaaaattcaaaattttcgggtttattacagggacagcagagatccactttggcgccggctcgaggggg

SEQ ID NO: 97 - protein, 144 aa, Artificial Sequence
  Synthetic Polypeptide
MAQLKKKLQANKKELAQLKWKLQALKKKLAQGGGGSGSMIKIATRKYLGKQNVYDIGVERDHNFALKNGFIASNCMALRLKDGGRYLADFKTTYKAKKPVQMPGAYNVDRKLDITSHNEDYTVVEQYERSEGRHSTGGMDELYK

SEQ ID NO: 98 - DNA, 3530 bp, Artificial Sequence
  Synthetic Polynucleotide
ctttcctgcgttatcccctgattctgtggataaccgtattaccgcctttgagtgagctgataccgctcgccgcagccgaacgaccgagcgcagcgagtcagtgagcgaggaagcggaagagcgcccaatacgcaaaccgcctctccccgcgcgttggccgattcattaatgcagctggcacgacaggtttcccgactggaaagcgggcagtgagcgcaacgcaattaatacgcgtaccgctagccaggaagagtttgtagaaacgcaaaaaggccatccgtcaggatggccttctgcttagtttgatgcctggcagtttatggcgggcgtcctgcccgccaccctccgggccgttgcttcacaacgatcaaatccgctcccggcggatttgtcctactcaggagagcgttcaccgacaaacaacagataaaacgaaaggcccagtcttccgactgagcctttcgttttatttgatgcctggcagttccctactctcgcgttaacgctagcatggatgttttcccagtcacgacgttgtaaaacgacggccagtcttaagctcgggccccaaataatgattttattttgactgatagtgacctgttcgttgcaacaaattgatgagcaatgcttttttataatgccaactttgtacaaaaaagcaggctccgaattcaccggtgccgccaccatgagcgagctgattaaggagaacatgcacatgaagctgtacatggagggcaccgtggacaaccatcacttcaagtgcacatccgagggcgaaggcaagccctacgagggcacccagaccatgagaatcaaggtggtcgagggcggccctctccccttcgccttcgacatcctggctactagcttcctctacggcagcaagaccttcatcaaccacacccagggcatccccgacttcttcaagcagtccttccctgagggcttcacatgggagagagtcaccacatacgaagacgggggcgtgctgaccgctacccaggacaccagcctccaggacggctgcctcatctacaacgtcaagatcagaggggtgaacttcacatccaacggccctgtgatgcagaagaaaacactcggctgggaggccttcaccgagacgctgtaccccgctgacggcggcctggaaggcagaaacgacatggccctgaagctcgtgggcgggagccatctgatcgcaaacatcaagaccacatatagatccaagaaacccgctaagaacctcaagatgcctggcgtctactatgtggactacagactggaaagaatcaaggaggccaacaacgagacctacgtcgagcagcacgaggtggcagtggccagatactgcgacctccctagcaaactggggcacaagcttaattaattaattaagaattcgacccagctttcttgtacaaagttggcattataaaaaataattgctcatcaatttgttgcaacgaacaggtcactatcagtcaaaataaaatcattatttgccatccagctgatatcccctatagtgagtcgtattacatggtcatagctgtttcctggcagctctggcccgtgtctcaaaatctctgatgttacattgcacaagataaaaatatatcatcatgcctcctctagaccagccaggacagaaatgcctcgacttcgctgctgcccaaggttgccgggtgacgcacaccgtggaaacggatgaaggcacgaacccagtggacataagcctgttcggttcgtaagctgtaatgcaagtagcgtatgcgctcacgcaactggtccagaaccttgaccgaacgcagcggtggtaacggcgcagtggcggttttcatggcttgttatgactgtttttttggggtacagtctatgcctcgggcatccaagcagcaagcgcgttacgccgtgggtcgatgtttgatgttatggagcagcaacgatgttacgcagcagggcagtcgccctaaaacaaagttaaacatcatgagggaagcggtgatcgccgaagtatcgactcaactatcagaggtagttggcgtcatcgagcgccatctcgaaccgacgttgctggccgtacatttgtacggctccgcagtggatggcggcctgaagccacacagtgatattgatttgctggttacggtgaccgtaaggcttgatgaaacaacgcggcgagctttgatcaacgaccttttggaaacttcggcttcccctggagagagcgagattctccgcgctgtagaagtcaccattgttgtgcacgacgacatcattccgtggcgttatccagctaagcgcgaactgcaatttggagaatggcagcgcaatgacattcttgcaggtatcttcgagccagccacgatcgacattgatctggctatcttgctgacaaaagcaagagaacatagcgttgccttggtaggtccagcggcggaggaactctttgatccggttcctgaacaggatctatttgaggcgctaaatgaaaccttaacgctatggaactcgccgcccgactgggctggcgatgagcgaaatgtagtgcttacgttgtcccgcatttggtacagcgcagtaaccggcaaaatcgcgccgaaggatgtcgctgccgactgggcaatggagcgcctgccggcccagtatcagcccgtcatacttgaagctagacaggcttatcttggacaagaagaagatcgcttggcctcgcgcgcagatcagttggaagaatttgtccactacgtgaaaggcgagatcaccaaggtagtcggcaaataaccctcgagccacccatgaccaaaatcccttaacgtgagttacgcgtcgttccactgagcgtcagaccccgtagaaaagatcaaaggatcttcttgagatcctttttttctgcgcgtaatctgctgcttgcaaacaaaaaaaccaccgctaccagcggtggtttgtttgccggatcaagagctaccaactctttttccgaaggtaactggcttcagcagagcgcagataccaaatactgtccttctagtgtagccgtagttaggccaccacttcaagaactctgtagcaccgcctacatacctcgctctgctaatcctgttaccagtggctgctgccagtggcgataagtcgtgtcttaccgggttggactcaagacgatagttaccggataaggcgcagcggtcgggctgaacggggggttcgtgcacacagcccagcttggagcgaacgacctacaccgaactgagatacctacagcgtgagcattgagaaagcgccacgcttcccgaagggagaaaggcggacaggtatccggtaagcggcagggtcggaacaggagagcgcacgagggagcttccagggggaaacgcctggtatctttatagtcctgtcgggtttcgccacctctgacttgagcgtcgatttttgtgatgctcgtcaggggggcggagcctatggaaaaacgccagcaacgcggcctttttacggttcctggccttttgctggccttttgctcacatgtt

SEQ ID NO: 99 - protein, 233 aa, Artificial Sequence
  Synthetic Polypeptide
MSELIKENMHMKLYMEGTVDNHHFKCTSEGEGKPYEGTQTMRIKVVEGGPLPFAFDILATSFLYGSKTFINHTQGIPDFFKQSFPEGFTWERVTTYEDGGVLTATQDTSLQDGCLIYNVKIRGVNFTSNGPVMQKKTLGWEAFTETLYPADGGLEGRNDMALKLVGGSHLIANIKTTYRSKKPAKNLKMPGVYYVDYRLERIKEANNETYVEQHEVAVARYCDLPSKLGHKLN

SEQ ID NO: 100 - DNA, 3539 bp, Artificial Sequence
  Synthetic Polynucleotide
ctttcctgcgttatcccctgattctgtggataaccgtattaccgcctttgagtgagctgataccgctcgccgcagccgaacgaccgagcgcagcgagtcagtgagcgaggaagcggaagagcgcccaatacgcaaaccgcctctccccgcgcgttggccgattcattaatgcagctggcacgacaggtttcccgactggaaagcgggcagtgagcgcaacgcaattaatacgcgtaccgctagccaggaagagtttgtagaaacgcaaaaaggccatccgtcaggatggccttctgcttagtttgatgcctggcagtttatggcgggcgtcctgcccgccaccctccgggccgttgcttcacaacgatcaaatccgctcccggcggatttgtcctactcaggagagcgttcaccgacaaacaacagataaaacgaaaggcccagtcttccgactgagcctttcgttttatttgatgcctggcagttccctactctcgcgttaacgctagcatggatgttttcccagtcacgacgttgtaaaacgacggccagtcttaagctcgggccccaaataatgattttattttgactgatagtgacctgttcgttgcaacaaattgatgagcaatgcttttttataatgccaactttgtacaaaaaagcaggctccgaattcaccggtgccgccaccatggtgagcaagggcgaggaggataacatggccatcatcaaggagttcatgcgcttcaaggtgcacatggagggctccgtgaacggccacgagttcgagatcgagggcgagggcgagggccgcccctacgagggcacccagaccgccaagctgaaggtgaccaagggtggccccctgcccttcgcctgggacatcctgtcccctcagttcatgtacggctccaaggcctacgtgaagcaccccgccgacatccccgactacttgaagctgtccttccccgagggcttcaagtgggagcgcgtgatgaacttcgaggacggcggcgtggtgaccgtgacccaggactcctccctgcaggacggcgagttcatctacaaggtgaagctgcgcggcaccaacttcccctccgacggccccgtaatgcagaagaagaccatgggctgggaggcctcctccgagcggatgtaccccgaggacggcgccctgaagggcgagatcaagcagaggctgaagctgaaggacggcggccactacgacgctgaggtcaagaccacctacaaggccaagaagcccgtgcagctgcccggcgcctacaacgtcaacattaagttggacatcacctcccacaacgaggactacaccatcgtggaacagtacgaacgcgccgagggccgccactccaccggcggcatggacgagctgtacaagtgattaattaagaattcgacccagctttcttgtacaaagttggcattataaaaaataattgctcatcaatttgttgcaacgaacaggtcactatcagtcaaaataaaatcattatttgccatccagctgatatcccctatagtgagtcgtattacatggtcatagctgtttcctggcagctctggcccgtgtctcaaaatctctgatgttacattgcacaagataaaaatatatcatcatgcctcctctagaccagccaggacagaaatgcctcgacttcgctgctgcccaaggttgccgggtgacgcacaccgtggaaacggatgaaggcacgaacccagtggacataagcctgttcggttcgtaagctgtaatgcaagtagcgtatgcgctcacgcaactggtccagaaccttgaccgaacgcagcggtggtaacggcgcagtggcggttttcatggcttgttatgactgtttttttggggtacagtctatgcctcgggcatccaagcagcaagcgcgttacgccgtgggtcgatgtttgatgttatggagcagcaacgatgttacgcagcagggcagtcgccctaaaacaaagttaaacatcatgagggaagcggtgatcgccgaagtatcgactcaactatcagaggtagttggcgtcatcgagcgccatctcgaaccgacgttgctggccgtacatttgtacggctccgcagtggatggcggcctgaagccacacagtgatattgatttgctggttacggtgaccgtaaggcttgatgaaacaacgcggcgagctttgatcaacgaccttttggaaacttcggcttcccctggagagagcgagattctccgcgctgtagaagtcaccattgttgtgcacgacgacatcattccgtggcgttatccagctaagcgcgaactgcaatttggagaatggcagcgcaatgacattcttgcaggtatcttcgagccagccacgatcgacattgatctggctatcttgctgacaaaagcaagagaacatagcgttgccttggtaggtccagcggcggaggaactctttgatccggttcctgaacaggatctatttgaggcgctaaatgaaaccttaacgctatggaactcgccgcccgactgggctggcgatgagcgaaatgtagtgcttacgttgtcccgcatttggtacagcgcagtaaccggcaaaatcgcgccgaaggatgtcgctgccgactgggcaatggagcgcctgccggcccagtatcagcccgtcatacttgaagctagacaggcttatcttggacaagaagaagatcgcttggcctcgcgcgcagatcagttggaagaatttgtccactacgtgaaaggcgagatcaccaaggtagtcggcaaataaccctcgagccacccatgaccaaaatcccttaacgtgagttacgcgtcgttccactgagcgtcagaccccgtagaaaagatcaaaggatcttcttgagatcctttttttctgcgcgtaatctgctgcttgcaaacaaaaaaaccaccgctaccagcggtggtttgtttgccggatcaagagctaccaactctttttccgaaggtaactggcttcagcagagcgcagataccaaatactgtccttctagtgtagccgtagttaggccaccacttcaagaactctgtagcaccgcctacatacctcgctctgctaatcctgttaccagtggctgctgccagtggcgataagtcgtgtcttaccgggttggactcaagacgatagttaccggataaggcgcagcggtcgggctgaacggggggttcgtgcacacagcccagcttggagcgaacgacctacaccgaactgagatacctacagcgtgagcattgagaaagcgccacgcttcccgaagggagaaaggcggacaggtatccggtaagcggcagggtcggaacaggagagcgcacgagggagcttccagggggaaacgcctggtatctttatagtcctgtcgggtttcgccacctctgacttgagcgtcgatttttgtgatgctcgtcaggggggcggagcctatggaaaaacgccagcaacgcggcctttttacggttcctggccttttgctggccttttgctcacatgtt

SEQ ID NO: 101 - protein, 236 aa, Artificial Sequence
  Synthetic Polypeptide
MVSKGEEDNMAIIKEFMRFKVHMEGSVNGHEFEIEGEGEGRPYEGTQTAKLKVTKGGPLPFAWDILSPQFMYGSKAYVKHPADIPDYLKLSFPEGFKWERVMNFEDGGVVTVTQDSSLQDGEFIYKVKLRGTNFPSDGPVMQKKTMGWEASSERMYPEDGALKGEIKQRLKLKDGGHYDAEVKTTYKAKKPVQLPGAYNVNIKLDITSHNEDYTIVEQYERAEGRHSTGGMDELYK

SEQ ID NO: 102 - DNA, 10137 bp, Artificial Sequence
  Synthetic Polynucleotide
cccggggttattaatagtaatcaattacggggtcattagttcatagcccatatatggagttccgcgttacataacttacggtaaatggcccgcctggctgaccgcccaacgacccccgcccattgacgtcaataatgacgtatgttcccatagtaacgccaatagggactttccattgacgtcaatgggtggagtatttacggtaaactgcccacttggcagtacatcaagtgtatcatatgccaagtacgccccctattgacgtcaatgacggtaaatggcccgcctggcattatgcccagtacatgaccttatgggactttcctacttggcagtacatctacgtattagtcatcgctattaccatggtgatgcggttttggcagtacatcaatgggcgtggatagcggtttgactcacggggatttccaagtctccaccccattgacgtcaatgggagtttgttttggcaccaaaatcaacgggactttccaaaatgtcgtaacaactccgccccattgacgcaaatgggcggtaggcgtgtacggtgggaggtctatataagcagagctctctggctaactgtcgggatcaacaagtttgtacaaaaaagctgaacgagaaacgtaaaatgatataaatatcaatatattaaattagattttgcataaaaaacagactacataatactgtaaaacacaacatatccagtcactatggcggccgcattaggcaccccaggctttacactttatgcttccggctcgtataatgtgtggattttgagttaggatccgtcgagattttcaggagctaaggaagctaaaatggagaaaaaaatcactggatataccaccgttgatatatcccaatggcatcgtaaagaacattttgaggcatttcagtcagttgctcaatgtacctataaccagaccgttcagctggatattacggcctttttaaagaccgtaaagaaaaataagcacaagttttatccggcctttattcacattcttgcccgcctgatgaatgctcatccggaattccgtatggcaatgaaagacggtgagctggtgatatgggatagtgttcacccttgttacaccgttttccatgagcaaactgaaacgttttcatcgctctggagtgaataccacgacgatttccggcagtttctacacatatattcgcaagatgtggcgtgttacggtgaaaacctggcctatttccctaaagggtttattgagaatatgtttttcgtctcagccaatccctgggtgagtttcaccagttttgatttaaacgtggccaatatggacaacttcttcgcccccgttttcaccatgggcaaatattatacgcaaggcgacaaggtgctgatgccgctggcgattcaggttcatcatgccgtttgtgatggcttccatgtcggcagaatgcttaatgaattacaacagtactgcgatgagtggcagggcggggcgtaaagatctggatccggcttactaaaagccagataacagtatgcgtatttgcgcgctgatttttgcggtataagaatatatactgatatgtatacccgaagtatgtcaaaaagaggtatgctatgaagcagcgtattacagtgacagttgacagcgacagctatcagttgctcaaggcatatatgatgtcaatatctccggtctggtaagcacaaccatgcagaatgaagcccgtcgtctgcgtgccgaacgctggaaagcggaaaatcaggaagggatggctgaggtcgcccggtttattgaaatgaacggctcttttgctgacgagaacaggggctggtgaaatgcagtttaaggtttacacctataaaagagagagccgttatcgtctgtttgtggatgtacagagtgatattattgacacgcccgggcgacggatggtgatccccctggccagtgcacgtctgctgtcagataaagtctcccgtgaactttacccggtggtgcatatcggggatgaaagctggcgcatgatgaccaccgatatggccagtgtgccggtctccgttatcggggaagaagtggctgatctcagccaccgcgaaaatgacatcaaaaacgccattaacctgatgttctggggaatataaatgtcaggctcccttatacacagccagtctgcaggtcgaccatagtgactggatatgttgtgttttacagtattatgtagtctgttttttatgcaaaatctaatttaatatattgatatttatatcattttacgtttctcgttcagctttcttgtacaaagtggttggtaagcctatccctaaccctctcctcggtctcgattctacgtagtaatgagctagcagtctcgaggttaacgaattccgccccccccctaacgttactggccgaagccgcttggaataaggccggtgtgcgcttgtctatatgttattttccaccatattgccgtcttttggcaatgtgagggcccggaaacctggccctgtcttcttgacgagcattcctaggggtctttcccctctcgccaaaggaatgcaaggtctgttgaatgtcgtgaaggaagcagttcctctggaagcttcttgaagacaaacaacgtctgtagcgaccctttgcaggcagcggaaccccccacctggcgacaggtgcccctgcggccaaaagccacgtgtataagatacacctgcaaaggcggcacaaccccagtgccacgttgtgagttggatagttgtggaaagagtcaaatggctctcctcaagcgtattcaacaaggggctgaaggatgcccagaaggtaccccattgtatgggatctgatctggggcctcggtgcacatgctttacatgtgtttagtcgaggttaaaaaaacgtctaggccccccgaaccacggggacgtggttttcctttgaaaaacacgataataccatggccatgaaaaagcctgaactcaccgcgacgtctgtcgagaagtttctgatcgaaaagttcgacagcgtctccgacctgatgcagctctcggagggcgaagaatctcgtgctttcagcttcgatgtaggagggcgtggatatgtcctgcgggtaaatagctgcgccgatggtttctacaaagatcgttatgtttatcggcactttgcatcggccgcgctcccgattccggaagtgcttgacattggggaatttagcgagagcctgacctattgcctttcatacgagaccgagatcctgactgtcgagtacggattgcttcctatcggcaaaatcgtggagaagaggattgaatgtaccgtctattcagtcgataataatgggaacatctacacacagcccgtggctcaatggcacgacagaggagagcaggaagtttttgaatactgtctcgaggacggatccctcatccgcgctactaaagatcataagtttatgaccgtggacggccagatgctgccaattgacgaaatttttgaacgagagctggatctgatgagagtcgacaaccttccaaactgacaccggtggcgcgttaagtcgacaatcaacctctggattacaaaatttgtgaaagattgactggtattcttaactatgttgctccttttacgctatgtggatacgctgctttaatgcctttgtatcatgctattgcttcccgtatggctttcattttctcctccttgtataaatcctggttgctgtctctttatgaggagttgtggcccgttgtcaggcaacgtggcgtggtgtgcactgtgtttgctgacgcaacccccactggttggggcattgccaccacctgtcagctcctttccgggactttcgctttccccctccctattgccacggcggaactcatcgccgcctgccttgcccgctgctggacaggggctcggctgttgggcactgacaattccgtggtgttgtcggggaaatcatcgtcctttccttggctgctcgcctgtgttgccacctggattctgcgcgggacgtccttctgctacgtcccttcggccctcaatccagcggaccttccttcccgcggcctgctgccggctctgcggcctcttccgcgtcttcgccttcgccctcagacgagtcggatctccctttgggccgcctccccgcgtcgactttaagaccaatgacttacaaggcagctgtagatcttagccactttttaaaagaaaaggggggactggaagggctaattcactcccaacgaagacaagatctgctttttgcttgtactgggtctctctggttagaccagatctgagcctgggagctctctggctaactagggaacccactgcttaagcctcaataaagcttgccttgagtgcttcaagtagtgtgtgcccgtctgttgtgtgactctggtaactagagatccctcagacccttttagtcagtgtggaaaatctctagcagtacgtatagtagttcatgtcatcttattattcagtatttataacttgcaaagaaatgaatatcagagagtgagaggaacttgtttattgcagcttataatggttacaaataaagcaatagcatcacaaatttcacaaataaagcatttttttcactgcattctagttgtggtttgtccaaactcatcaatgtatcttatcatgtctggctctagctatcccgcccctaactccgcccatcccgcccctaactccgcccagttccgcccattctccgccccatggctgactaattttttttatttatgcagaggccgaggccgcctcggcctctgagctattccagaagtagtgaggaggcttttttggaggcctagggacgtacccaattcgccctatagtgagtcgtattacgcgcgctcactggccgtcgttttacaacgtcgtgactgggaaaaccctggcgttacccaacttaatcgccttgcagcacatccccctttcgccagctggcgtaatagcgaagaggcccgcaccgatcgcccttcccaacagttgcgcagcctgaatggcgaatgggacgcgccctgtagcggcgcattaagcgcggcgggtgtggtggttacgcgcagcgtgaccgctacacttgccagcgccctagcgcccgctcctttcgctttcttcccttcctttctcgccacgttcgccggctttccccgtcaagctctaaatcgggggctccctttagggttccgatttagtgctttacggcacctcgaccccaaaaaacttgattagggtgatggttcacgtagtgggccatcgccctgatagacggtttttcgccctttgacgttggagtccacgttctttaatagtggactcttgttccaaactggaacaacactcaaccctatctcggtctattcttttgatttataagggattttgccgatttcggcctattggttaaaaaatgagctgatttaacaaaaatttaacgcgaattttaacaaaatattaacgcttacaatttaggtggcacttttcggggaaatgtgcgcggaacccctatttgtttatttttctaaatacattcaaatatgtatccgctcatgagacaataaccctgataaatgcttcaataatattgaaaaaggaagagtatgagtattcaacatttccgtgtcgcccttattcccttttttgcggcattttgccttcctgtttttgctcacccagaaacgctggtgaaagtaaaagatgctgaagatcagttgggtgcacgagtgggttacatcgaactggatctcaacagcggtaagatccttgagagttttcgccccgaagaacgttttccaatgatgagcacttttaaagttctgctatgtggcgcggtattatcccgtattgacgccgggcaagagcaactcggtcgccgcatacactattctcagaatgacttggttgagtactcaccagtcacagaaaagcatcttacggatggcatgacagtaagagaattatgcagtgctgccataaccatgagtgataacactgcggccaacttacttctgacaacgatcggaggaccgaaggagctaaccgcttttttgcacaacatgggggatcatgtaactcgccttgatcgttgggaaccggagctgaatgaagccataccaaacgacgagcgtgacaccacgatgcctgtagcaatggcaacaacgttgcgcaaactattaactggcgaactacttactctagcttcccggcaacaattaatagactggatggaggcggataaagttgcaggaccacttctgcgctcggcccttccggctggctggtttattgctgataaatctggagccggtgagcgtgggtctcgcggtatcattgcagcactggggccagatggtaagccctcccgtatcgtagttatctacacgacggggagtcaggcaactatggatgaacgaaatagacagatcgctgagataggtgcctcactgattaagcattggtaactgtcagaccaagtttactcatatatactttagattgatttaaaacttcatttttaatttaaaaggatctaggtgaagatcctttttgataatctcatgaccaaaatcccttaacgtgagttttcgttccactgagcgtcagaccccgtagaaaagatcaaaggatcttcttgagatcctttttttctgcgcgtaatctgctgcttgcaaacaaaaaaaccaccgctaccagcggtggtttgtttgccggatcaagagctaccaactctttttccgaaggtaactggcttcagcagagcgcagataccaaatactgttcttctagtgtagccgtagttaggccaccacttcaagaactctgtagcaccgcctacatacctcgctctgctaatcctgttaccagtggctgctgccagtggcgataagtcgtgtcttaccgggttggactcaagacgatagttaccggataaggcgcagcggtcgggctgaacggggggttcgtgcacacagcccagcttggagcgaacgacctacaccgaactgagatacctacagcgtgagctatgagaaagcgccacgcttcccgaagggagaaaggcggacaggtatccggtaagcggcagggtcggaacaggagagcgcacgagggagcttccagggggaaacgcctggtatctttatagtcctgtcgggtttcgccacctctgacttgagcgtcgatttttgtgatgctcgtcaggggggcggagcctatggaaaaacgccagcaacgcggcctttttacggttcctggccttttgctggccttttgctcacatgttctttcctgcgttatcccctgattctgtggataaccgtattaccgcctttgagtgagctgataccgctcgccgcagccgaacgaccgagcgcagcgagtcagtgagcgaggaagcggaagagcgcccaatacgcaaaccgcctctccccgcgcgttggccgattcattaatgcagctggcacgacaggtttcccgactggaaagcgggcagtgagcgcaacgcaattaatgtgagttagctcactcattaggcaccccaggctttacactttatgcttccggctcgtatgttgtgtggaattgtgagcggataacaatttcacacaggaaacagctatgaccatgattacgccaagcgcgcaattaaccctcactaaagggaacaaaagctggagctgcaagcttaatgtagtcttatgcaatactcttgtagtcttgcaacatggtaacgatgagttagcaacatgccttacaaggagagaaaaagcaccgtgcatgccgattggtggaagtaaggtggtacgatcgtgccttattaggaaggcaacagacgggtctgacatggattggacgaaccactgaattgccgcattgcagagatattgtatttaagtgcctagctcgatacataaacgggtctctctggttagaccagatctgagcctgggagctctctggctaactagggaacccactgcttaagcctcaataaagcttgccttgagtgcttcaagtagtgtgtgcccgtctgttgtgtgactctggtaactagagatccctcagacccttttagtcagtgtggaaaatctctagcagtggcgcccgaacagggacttgaaagcgaaagggaaaccagaggagctctctcgacgcaggactcggcttgctgaagcgcgcacggcaagaggcgaggggcggcgactggtgagtacgccaaaaattttgactagcggaggctagaaggagagagatgggtgcgagagcgtcagtattaagcgggggagaattagatcgcgatgggaaaaaattcggttaaggccagggggaaagaaaaaatataaattaaaacatatagtatgggcaagcagggagctagaacgattcgcagttaatcctggcctgttagaaacatcagaaggctgtagacaaatactgggacagctacaaccatcccttcagacaggatcagaagaacttagatcattatataatacagtagcaaccctctattgtgtgcatcaaaggatagagataaaagacaccaaggaagctttagacaagatagaggaagagcaaaacaaaagtaagaccaccgcacagcaagcggccgctgatcttcagacctggaggaggagatatgagggacaattggagaagtgaattatataaatataaagtagtaaaaattgaaccattaggagtagcacccaccaaggcaaagagaagagtggtgcagagagaaaaaagagcagtgggaataggagctttgttccttgggttcttgggagcagcaggaagcactatgggcgcagcgtcaatgacgctgacggtacaggccagacaattattgtctggtatagtgcagcagcagaacaatttgctgagggctattgaggcgcaacagcatctgttgcaactcacagtctggggcatcaagcagctccaggcaagaatcctggctgtggaaagatacctaaaggatcaacagctcctggggatttggggttgctctggaaaactcatttgcaccactgctgtgccttggaatgctagttggagtaataaatctctggaacagatttggaatcacacgacctggatggagtgggacagagaaattaacaattacacaagcttaatacactccttaattgaagaatcgcaaaaccagcaagaaaagaatgaacaagaattattggaattagataaatgggcaagtttgtggaattggtttaacataacaaattggctgtggtatataaaattattcataatgatagtaggaggcttggtaggtttaagaatagtttttgctgtactttctatagtgaatagagttaggcagggatattcaccattatcgtttcagacccacctcccaaccccgaggggacccttgcgccttttccaaggcagccctgggtttgcgcagggacgcggctgctctgggcgtggttccgggaaacgcagcggcgccgaccctgggtctcgcacattcttcacgtccgttcgcagcgtcacccggatcttcgccgctacccttgtgggccccccggcgacgcttcctgctccgcccctaagtcgggaaggttccttgcggttcgcggcgtgccggacgtgacaaacggaagccgcacgtctcactagtaccctcgcagacggacagcgccagggagcaatggcagcgcgccgaccgcgatgggctgtggccaatagcggctgctcagcagggcgcgccgagagcagcggccgggaaggggcggtgcgggaggcggggtgtggggcggtagtgtgggccctgttcctgcccgcgcggtgttccgcattctgcaagcctccggagcgcacgtcggcagtcggctccctcgttgaccgaatcaccgacctctctccccagggggtacccagctgtctagagaattctagatcttgagacaaatggcagtattcatccacaattttaaaagaaaaggggggattggggggtacagtgcaggggaaagaatagtagacataatagcaacagacatacaaactaaagaattacaaaaacaaattacaaaaattcaaaattttcgggtttattacagggacagcagagatccactttggcgccggctcgaggggg

SEQ ID NO: 103 - protein, 193 aa, Artificial Sequence
  Synthetic Polypeptide
MAMKKPELTATSVEKFLIEKFDSVSDLMQLSEGEESRAFSFDVGGRGYVLRVNSCADGFYKDRYVYRHFASAALPIPEVLDIGEFSESLTYCLSYETEILTVEYGLLPIGKIVEKRIECTVYSVDNNGNIYTQPVAQWHDRGEQEVFEYCLEDGSLIRATKDHKFMTVDGQMLPIDEIFERELDLMRVDNLPN

SEQ ID NO: 104 - DNA, 10428 bp, Artificial Sequence
  Synthetic Polynucleotide
cccggggttattaatagtaatcaattacggggtcattagttcatagcccatatatggagttccgcgttacataacttacggtaaatggcccgcctggctgaccgcccaacgacccccgcccattgacgtcaataatgacgtatgttcccatagtaacgccaatagggactttccattgacgtcaatgggtggagtatttacggtaaactgcccacttggcagtacatcaagtgtatcatatgccaagtacgccccctattgacgtcaatgacggtaaatggcccgcctggcattatgcccagtacatgaccttatgggactttcctacttggcagtacatctacgtattagtcatcgctattaccatggtgatgcggttttggcagtacatcaatgggcgtggatagcggtttgactcacggggatttccaagtctccaccccattgacgtcaatgggagtttgttttggcaccaaaatcaacgggactttccaaaatgtcgtaacaactccgccccattgacgcaaatgggcggtaggcgtgtacggtgggaggtctatataagcagagctctctggctaactgtcgggatcaacaagtttgtacaaaaaagctgaacgagaaacgtaaaatgatataaatatcaatatattaaattagattttgcataaaaaacagactacataatactgtaaaacacaacatatccagtcactatggcggccgcattaggcaccccaggctttacactttatgcttccggctcgtataatgtgtggattttgagttaggatccgtcgagattttcaggagctaaggaagctaaaatggagaaaaaaatcactggatataccaccgttgatatatcccaatggcatcgtaaagaacattttgaggcatttcagtcagttgctcaatgtacctataaccagaccgttcagctggatattacggcctttttaaagaccgtaaagaaaaataagcacaagttttatccggcctttattcacattcttgcccgcctgatgaatgctcatccggaattccgtatggcaatgaaagacggtgagctggtgatatgggatagtgttcacccttgttacaccgttttccatgagcaaactgaaacgttttcatcgctctggagtgaataccacgacgatttccggcagtttctacacatatattcgcaagatgtggcgtgttacggtgaaaacctggcctatttccctaaagggtttattgagaatatgtttttcgtctcagccaatccctgggtgagtttcaccagttttgatttaaacgtggccaatatggacaacttcttcgcccccgttttcaccatgggcaaatattatacgcaaggcgacaaggtgctgatgccgctggcgattcaggttcatcatgccgtttgtgatggcttccatgtcggcagaatgcttaatgaattacaacagtactgcgatgagtggcagggcggggcgtaaagatctggatccggcttactaaaagccagataacagtatgcgtatttgcgcgctgatttttgcggtataagaatatatactgatatgtatacccgaagtatgtcaaaaagaggtatgctatgaagcagcgtattacagtgacagttgacagcgacagctatcagttgctcaaggcatatatgatgtcaatatctccggtctggtaagcacaaccatgcagaatgaagcccgtcgtctgcgtgccgaacgctggaaagcggaaaatcaggaagggatggctgaggtcgcccggtttattgaaatgaacggctcttttgctgacgagaacaggggctggtgaaatgcagtttaaggtttacacctataaaagagagagccgttatcgtctgtttgtggatgtacagagtgatattattgacacgcccgggcgacggatggtgatccccctggccagtgcacgtctgctgtcagataaagtctcccgtgaactttacccggtggtgcatatcggggatgaaagctggcgcatgatgaccaccgatatggccagtgtgccggtctccgttatcggggaagaagtggctgatctcagccaccgcgaaaatgacatcaaaaacgccattaacctgatgttctggggaatataaatgtcaggctcccttatacacagccagtctgcaggtcgaccatagtgactggatatgttgtgttttacagtattatgtagtctgttttttatgcaaaatctaatttaatatattgatatttatatcattttacgtttctcgttcagctttcttgtacaaagtggttggtaagcctatccctaaccctctcctcggtctcgattctacgtagtaatgagctagcagtctcgaggttaacgaattccgccccccccctaacgttactggccgaagccgcttggaataaggccggtgtgcgcttgtctatatgttattttccaccatattgccgtcttttggcaatgtgagggcccggaaacctggccctgtcttcttgacgagcattcctaggggtctttcccctctcgccaaaggaatgcaaggtctgttgaatgtcgtgaaggaagcagttcctctggaagcttcttgaagacaaacaacgtctgtagcgaccctttgcaggcagcggaaccccccacctggcgacaggtgcccctgcggccaaaagccacgtgtataagatacacctgcaaaggcggcacaaccccagtgccacgttgtgagttggatagttgtggaaagagtcaaatggctctcctcaagcgtattcaacaaggggctgaaggatgcccagaaggtaccccattgtatgggatctgatctggggcctcggtgcacatgctttacatgtgtttagtcgaggttaaaaaaacgtctaggccccccgaaccacggggacgtggttttcctttgaaaaacacgataataccatggccatgattaagatcgctacgcggaagtacctggggaaacagaacgtctacgacataggtgtggagcgcgatcacaactttgctctgaaaaatggatttatcgccagcaactgcatctcccgccgtgcacagggtgtcacgttgcaagacctgcctgaaaccgaactgcccgctgttctgcagccggtcgcggaggccatggatgcgatcgctgcggccgatcttagccagacgagcgggttcggcccattcggaccgcaaggaatcggtcaatacactacatggcgtgatttcatatgcgcgattgctgatccccatgtgtatcactggcaaactgtgatggacgacaccgtcagtgcgtccgtcgcgcaggctctcgatgagctgatgctttgggccgaggactgccccgaagtccggcacctcgtgcacgcggatttcggctccaacaatgtcctgacggacaatggccgcataacagcggtcattgactggagcgaggcgatgttcggggattcccaatacgaggtcgccaacatcttcttctggaggccgtggttggcttgtatggagcagcagacgcgctacttcgagcggaggcatccggagcttgcaggatcgccgcggctccgggcgtatatgctccgcattggtcttgaccaactctatcagagcttggttgacggcaatttcgatgatgcagcttgggcgcagggtcgatgcgacgcaatcgtccgatccggagccgggactgtcgggcgtacacaaatcgcccgcagaagcgcggccgtctggaccgatggctgtgtagaagtactcgccgatagtggaaaccgacgccccagcactcgtccgagggcaaaggaatagcaccggtggcgcgttaagtcgacaatcaacctctggattacaaaatttgtgaaagattgactggtattcttaactatgttgctccttttacgctatgtggatacgctgctttaatgcctttgtatcatgctattgcttcccgtatggctttcattttctcctccttgtataaatcctggttgctgtctctttatgaggagttgtggcccgttgtcaggcaacgtggcgtggtgtgcactgtgtttgctgacgcaacccccactggttggggcattgccaccacctgtcagctcctttccgggactttcgctttccccctccctattgccacggcggaactcatcgccgcctgccttgcccgctgctggacaggggctcggctgttgggcactgacaattccgtggtgttgtcggggaaatcatcgtcctttccttggctgctcgcctgtgttgccacctggattctgcgcgggacgtccttctgctacgtcccttcggccctcaatccagcggaccttccttcccgcggcctgctgccggctctgcggcctcttccgcgtcttcgccttcgccctcagacgagtcggatctccctttgggccgcctccccgcgtcgactttaagaccaatgacttacaaggcagctgtagatcttagccactttttaaaagaaaaggggggactggaagggctaattcactcccaacgaagacaagatctgctttttgcttgtactgggtctctctggttagaccagatctgagcctgggagctctctggctaactagggaacccactgcttaagcctcaataaagcttgccttgagtgcttcaagtagtgtgtgcccgtctgttgtgtgactctggtaactagagatccctcagacccttttagtcagtgtggaaaatctctagcagtacgtatagtagttcatgtcatcttattattcagtatttataacttgcaaagaaatgaatatcagagagtgagaggaacttgtttattgcagcttataatggttacaaataaagcaatagcatcacaaatttcacaaataaagcatttttttcactgcattctagttgtggtttgtccaaactcatcaatgtatcttatcatgtctggctctagctatcccgcccctaactccgcccatcccgcccctaactccgcccagttccgcccattctccgccccatggctgactaattttttttatttatgcagaggccgaggccgcctcggcctctgagctattccagaagtagtgaggaggcttttttggaggcctagggacgtacccaattcgccctatagtgagtcgtattacgcgcgctcactggccgtcgttttacaacgtcgtgactgggaaaaccctggcgttacccaacttaatcgccttgcagcacatccccctttcgccagctggcgtaatagcgaagaggcccgcaccgatcgcccttcccaacagttgcgcagcctgaatggcgaatgggacgcgccctgtagcggcgcattaagcgcggcgggtgtggtggttacgcgcagcgtgaccgctacacttgccagcgccctagcgcccgctcctttcgctttcttcccttcctttctcgccacgttcgccggctttccccgtcaagctctaaatcgggggctccctttagggttccgatttagtgctttacggcacctcgaccccaaaaaacttgattagggtgatggttcacgtagtgggccatcgccctgatagacggtttttcgccctttgacgttggagtccacgttctttaatagtggactcttgttccaaactggaacaacactcaaccctatctcggtctattcttttgatttataagggattttgccgatttcggcctattggttaaaaaatgagctgatttaacaaaaatttaacgcgaattttaacaaaatattaacgcttacaatttaggtggcacttttcggggaaatgtgcgcggaacccctatttgtttatttttctaaatacattcaaatatgtatccgctcatgagacaataaccctgataaatgcttcaataatattgaaaaaggaagagtatgagtattcaacatttccgtgtcgcccttattcccttttttgcggcattttgccttcctgtttttgctcacccagaaacgctggtgaaagtaaaagatgctgaagatcagttgggtgcacgagtgggttacatcgaactggatctcaacagcggtaagatccttgagagttttcgccccgaagaacgttttccaatgatgagcacttttaaagttctgctatgtggcgcggtattatcccgtattgacgccgggcaagagcaactcggtcgccgcatacactattctcagaatgacttggttgagtactcaccagtcacagaaaagcatcttacggatggcatgacagtaagagaattatgcagtgctgccataaccatgagtgataacactgcggccaacttacttctgacaacgatcggaggaccgaaggagctaaccgcttttttgcacaacatgggggatcatgtaactcgccttgatcgttgggaaccggagctgaatgaagccataccaaacgacgagcgtgacaccacgatgcctgtagcaatggcaacaacgttgcgcaaactattaactggcgaactacttactctagcttcccggcaacaattaatagactggatggaggcggataaagttgcaggaccacttctgcgctcggcccttccggctggctggtttattgctgataaatctggagccggtgagcgtgggtctcgcggtatcattgcagcactggggccagatggtaagccctcccgtatcgtagttatctacacgacggggagtcaggcaactatggatgaacgaaatagacagatcgctgagataggtgcctcactgattaagcattggtaactgtcagaccaagtttactcatatatactttagattgatttaaaacttcatttttaatttaaaaggatctaggtgaagatcctttttgataatctcatgaccaaaatcccttaacgtgagttttcgttccactgagcgtcagaccccgtagaaaagatcaaaggatcttcttgagatcctttttttctgcgcgtaatctgctgcttgcaaacaaaaaaaccaccgctaccagcggtggtttgtttgccggatcaagagctaccaactctttttccgaaggtaactggcttcagcagagcgcagataccaaatactgttcttctagtgtagccgtagttaggccaccacttcaagaactctgtagcaccgcctacatacctcgctctgctaatcctgttaccagtggctgctgccagtggcgataagtcgtgtcttaccgggttggactcaagacgatagttaccggataaggcgcagcggtcgggctgaacggggggttcgtgcacacagcccagcttggagcgaacgacctacaccgaactgagatacctacagcgtgagctatgagaaagcgccacgcttcccgaagggagaaaggcggacaggtatccggtaagcggcagggtcggaacaggagagcgcacgagggagcttccagggggaaacgcctggtatctttatagtcctgtcgggtttcgccacctctgacttgagcgtcgatttttgtgatgctcgtcaggggggcggagcctatggaaaaacgccagcaacgcggcctttttacggttcctggccttttgctggccttttgctcacatgttctttcctgcgttatcccctgattctgtggataaccgtattaccgcctttgagtgagctgataccgctcgccgcagccgaacgaccgagcgcagcgagtcagtgagcgaggaagcggaagagcgcccaatacgcaaaccgcctctccccgcgcgttggccgattcattaatgcagctggcacgacaggtttcccgactggaaagcgggcagtgagcgcaacgcaattaatgtgagttagctcactcattaggcaccccaggctttacactttatgcttccggctcgtatgttgtgtggaattgtgagcggataacaatttcacacaggaaacagctatgaccatgattacgccaagcgcgcaattaaccctcactaaagggaacaaaagctggagctgcaagcttaatgtagtcttatgcaatactcttgtagtcttgcaacatggtaacgatgagttagcaacatgccttacaaggagagaaaaagcaccgtgcatgccgattggtggaagtaaggtggtacgatcgtgccttattaggaaggcaacagacgggtctgacatggattggacgaaccactgaattgccgcattgcagagatattgtatttaagtgcctagctcgatacataaacgggtctctctggttagaccagatctgagcctgggagctctctggctaactagggaacccactgcttaagcctcaataaagcttgccttgagtgcttcaagtagtgtgtgcccgtctgttgtgtgactctggtaactagagatccctcagacccttttagtcagtgtggaaaatctctagcagtggcgcccgaacagggacttgaaagcgaaagggaaaccagaggagctctctcgacgcaggactcggcttgctgaagcgcgcacggcaagaggcgaggggcggcgactggtgagtacgccaaaaattttgactagcggaggctagaaggagagagatgggtgcgagagcgtcagtattaagcgggggagaattagatcgcgatgggaaaaaattcggttaaggccagggggaaagaaaaaatataaattaaaacatatagtatgggcaagcagggagctagaacgattcgcagttaatcctggcctgttagaaacatcagaaggctgtagacaaatactgggacagctacaaccatcccttcagacaggatcagaagaacttagatcattatataatacagtagcaaccctctattgtgtgcatcaaaggatagagataaaagacaccaaggaagctttagacaagatagaggaagagcaaaacaaaagtaagaccaccgcacagcaagcggccgctgatcttcagacctggaggaggagatatgagggacaattggagaagtgaattatataaatataaagtagtaaaaattgaaccattaggagtagcacccaccaaggcaaagagaagagtggtgcagagagaaaaaagagcagtgggaataggagctttgttccttgggttcttgggagcagcaggaagcactatgggcgcagcgtcaatgacgctgacggtacaggccagacaattattgtctggtatagtgcagcagcagaacaatttgctgagggctattgaggcgcaacagcatctgttgcaactcacagtctggggcatcaagcagctccaggcaagaatcctggctgtggaaagatacctaaaggatcaacagctcctggggatttggggttgctctggaaaactcatttgcaccactgctgtgccttggaatgctagttggagtaataaatctctggaacagatttggaatcacacgacctggatggagtgggacagagaaattaacaattacacaagcttaatacactccttaattgaagaatcgcaaaaccagcaagaaaagaatgaacaagaattattggaattagataaatgggcaagtttgtggaattggtttaacataacaaattggctgtggtatataaaattattcataatgatagtaggaggcttggtaggtttaagaatagtttttgctgtactttctatagtgaatagagttaggcagggatattcaccattatcgtttcagacccacctcccaaccccgaggggacccttgcgccttttccaaggcagccctgggtttgcgcagggacgcggctgctctgggcgtggttccgggaaacgcagcggcgccgaccctgggtctcgcacattcttcacgtccgttcgcagcgtcacccggatcttcgccgctacccttgtgggccccccggcgacgcttcctgctccgcccctaagtcgggaaggttccttgcggttcgcggcgtgccggacgtgacaaacggaagccgcacgtctcactagtaccctcgcagacggacagcgccagggagcaatggcagcgcgccgaccgcgatgggctgtggccaatagcggctgctcagcagggcgcgccgagagcagcggccgggaaggggcggtgcgggaggcggggtgtggggcggtagtgtgggccctgttcctgcccgcgcggtgttccgcattctgcaagcctccggagcgcacgtcggcagtcggctccctcgttgaccgaatcaccgacctctctccccagggggtacccagctgtctagagaattctagatcttgagacaaatggcagtattcatccacaattttaaaagaaaaggggggattggggggtacagtgcaggggaaagaatagtagacataatagcaacagacatacaaactaaagaattacaaaaacaaattacaaaaattcaaaattttcgggtttattacagggacagcagagatccactttggcgccggctcgaggggg

SEQ ID NO: 105 - protein, 290 aa, Artificial Sequence
  Synthetic Polypeptide
MAMIKIATRKYLGKQNVYDIGVERDHNFALKNGFIASNCISRRAQGVTLQDLPETELPAVLQPVAEAMDAIAAADLSQTSGFGPFGPQGIGQYTTWRDFICAIADPHVYHWQTVMDDTVSASVAQALDELMLWAEDCPEVRHLVHADFGSNNVLTDNGRITAVIDWSEAMFGDSQYEVANIFFWRPWLACMEQQTRYFERRHPELAGSPRLRAYMLRIGLDQLYQSLVDGNFDDAAWAQGRCDAIVRSGAGTVGRTQIARRSAAVWTDGCVEVLADSGNRRPSTRPRAKE

SEQ ID NO: 106 - DNA, 9222 bp, Artificial Sequence
  Synthetic Polynucleotide
cccggggttattaatagtaatcaattacggggtcattagttcatagcccatatatggagttccgcgttacataacttacggtaaatggcccgcctggctgaccgcccaacgacccccgcccattgacgtcaataatgacgtatgttcccatagtaacgccaatagggactttccattgacgtcaatgggtggagtatttacggtaaactgcccacttggcagtacatcaagtgtatcatatgccaagtacgccccctattgacgtcaatgacggtaaatggcccgcctggcattatgcccagtacatgaccttatgggactttcctacttggcagtacatctacgtattagtcatcgctattaccatggtgatgcggttttggcagtacatcaatgggcgtggatagcggtttgactcacggggatttccaagtctccaccccattgacgtcaatgggagtttgttttggcaccaaaatcaacgggactttccaaaatgtcgtaacaactccgccccattgacgcaaatgggcggtaggcgtgtacggtgggaggtctatataagcagagctctctggctaactgtcgggatcaacaagtttgtacaaaaaagcaggctccgaattcaccggtgccgccaccatgagcgagctgattaaggagaacatgcacatgaagctgtacatggagggcaccgtggacaaccatcacttcaagtgcacatccgagggcgaaggcaagccctacgagggcacccagaccatgagaatcaaggtggtcgagggcggccctctccccttcgccttcgacatcctggctactagcttcctctacggcagcaagaccttcatcaaccacacccagggcatccccgacttcttcaagcagtccttccctgagggcttcacatgggagagagtcaccacatacgaagacgggggcgtgctgaccgctacccaggacaccagcctccaggacggctgcctcatctacaacgtcaagatcagaggggtgaacttcacatccaacggccctgtgatgcagaagaaaacactcggctgggaggccttcaccgagacgctgtaccccgctgacggcggcctggaaggcagaaacgacatggccctgaagctcgtgggcgggagccatctgatcgcaaacatcaagaccacatatagatccaagaaacccgctaagaacctcaagatgcctggcgtctactatgtggactacagactggaaagaatcaaggaggccaacaacgagacctacgtcgagcagcacgaggtggcagtggccagatactgcgacctccctagcaaactggggcacaagcttaattaattaattaagaattcgacccagctttcttgtacaaagtggttggtaagcctatccctaaccctctcctcggtctcgattctacgtagtaatgagctagcagtctcgaggttaacgaattccgccccccccctaacgttactggccgaagccgcttggaataaggccggtgtgcgcttgtctatatgttattttccaccatattgccgtcttttggcaatgtgagggcccggaaacctggccctgtcttcttgacgagcattcctaggggtctttcccctctcgccaaaggaatgcaaggtctgttgaatgtcgtgaaggaagcagttcctctggaagcttcttgaagacaaacaacgtctgtagcgaccctttgcaggcagcggaaccccccacctggcgacaggtgcccctgcggccaaaagccacgtgtataagatacacctgcaaaggcggcacaaccccagtgccacgttgtgagttggatagttgtggaaagagtcaaatggctctcctcaagcgtattcaacaaggggctgaaggatgcccagaaggtaccccattgtatgggatctgatctggggcctcggtgcacatgctttacatgtgtttagtcgaggttaaaaaaacgtctaggccccccgaaccacggggacgtggttttcctttgaaaaacacgataataccatggccatgaaaaagcctgaactcaccgcgacgtctgtcgagaagtttctgatcgaaaagttcgacagcgtctccgacctgatgcagctctcggagggcgaagaatctcgtgctttcagcttcgatgtaggagggcgtggatatgtcctgcgggtaaatagctgcgccgatggtttctacaaagatcgttatgtttatcggcactttgcatcggccgcgctcccgattccggaagtgcttgacattggggaatttagcgagagcctgacctattgcctttcatacgagaccgagatcctgactgtcgagtacggattgcttcctatcggcaaaatcgtggagaagaggattgaatgtaccgtctattcagtcgataataatgggaacatctacacacagcccgtggctcaatggcacgacagaggagagcaggaagtttttgaatactgtctcgaggacggatccctcatccgcgctactaaagatcataagtttatgaccgtggacggccagatgctgccaattgacgaaatttttgaacgagagctggatctgatgagagtcgacaaccttccaaactgacaccggtggcgcgttaagtcgacaatcaacctctggattacaaaatttgtgaaagattgactggtattcttaactatgttgctccttttacgctatgtggatacgctgctttaatgcctttgtatcatgctattgcttcccgtatggctttcattttctcctccttgtataaatcctggttgctgtctctttatgaggagttgtggcccgttgtcaggcaacgtggcgtggtgtgcactgtgtttgctgacgcaacccccactggttggggcattgccaccacctgtcagctcctttccgggactttcgctttccccctccctattgccacggcggaactcatcgccgcctgccttgcccgctgctggacaggggctcggctgttgggcactgacaattccgtggtgttgtcggggaaatcatcgtcctttccttggctgctcgcctgtgttgccacctggattctgcgcgggacgtccttctgctacgtcccttcggccctcaatccagcggaccttccttcccgcggcctgctgccggctctgcggcctcttccgcgtcttcgccttcgccctcagacgagtcggatctccctttgggccgcctccccgcgtcgactttaagaccaatgacttacaaggcagctgtagatcttagccactttttaaaagaaaaggggggactggaagggctaattcactcccaacgaagacaagatctgctttttgcttgtactgggtctctctggttagaccagatctgagcctgggagctctctggctaactagggaacccactgcttaagcctcaataaagcttgccttgagtgcttcaagtagtgtgtgcccgtctgttgtgtgactctggtaactagagatccctcagacccttttagtcagtgtggaaaatctctagcagtacgtatagtagttcatgtcatcttattattcagtatttataacttgcaaagaaatgaatatcagagagtgagaggaacttgtttattgcagcttataatggttacaaataaagcaatagcatcacaaatttcacaaataaagcatttttttcactgcattctagttgtggtttgtccaaactcatcaatgtatcttatcatgtctggctctagctatcccgcccctaactccgcccatcccgcccctaactccgcccagttccgcccattctccgccccatggctgactaattttttttatttatgcagaggccgaggccgcctcggcctctgagctattccagaagtagtgaggaggcttttttggaggcctagggacgtacccaattcgccctatagtgagtcgtattacgcgcgctcactggccgtcgttttacaacgtcgtgactgggaaaaccctggcgttacccaacttaatcgccttgcagcacatccccctttcgccagctggcgtaatagcgaagaggcccgcaccgatcgcccttcccaacagttgcgcagcctgaatggcgaatgggacgcgccctgtagcggcgcattaagcgcggcgggtgtggtggttacgcgcagcgtgaccgctacacttgccagcgccctagcgcccgctcctttcgctttcttcccttcctttctcgccacgttcgccggctttccccgtcaagctctaaatcgggggctccctttagggttccgatttagtgctttacggcacctcgaccccaaaaaacttgattagggtgatggttcacgtagtgggccatcgccctgatagacggtttttcgccctttgacgttggagtccacgttctttaatagtggactcttgttccaaactggaacaacactcaaccctatctcggtctattcttttgatttataagggattttgccgatttcggcctattggttaaaaaatgagctgatttaacaaaaatttaacgcgaattttaacaaaatattaacgcttacaatttaggtggcacttttcggggaaatgtgcgcggaacccctatttgtttatttttctaaatacattcaaatatgtatccgctcatgagacaataaccctgataaatgcttcaataatattgaaaaaggaagagtatgagtattcaacatttccgtgtcgcccttattcccttttttgcggcattttgccttcctgtttttgctcacccagaaacgctggtgaaagtaaaagatgctgaagatcagttgggtgcacgagtgggttacatcgaactggatctcaacagcggtaagatccttgagagttttcgccccgaagaacgttttccaatgatgagcacttttaaagttctgctatgtggcgcggtattatcccgtattgacgccgggcaagagcaactcggtcgccgcatacactattctcagaatgacttggttgagtactcaccagtcacagaaaagcatcttacggatggcatgacagtaagagaattatgcagtgctgccataaccatgagtgataacactgcggccaacttacttctgacaacgatcggaggaccgaaggagctaaccgcttttttgcacaacatgggggatcatgtaactcgccttgatcgttgggaaccggagctgaatgaagccataccaaacgacgagcgtgacaccacgatgcctgtagcaatggcaacaacgttgcgcaaactattaactggcgaactacttactctagcttcccggcaacaattaatagactggatggaggcggataaagttgcaggaccacttctgcgctcggcccttccggctggctggtttattgctgataaatctggagccggtgagcgtgggtctcgcggtatcattgcagcactggggccagatggtaagccctcccgtatcgtagttatctacacgacggggagtcaggcaactatggatgaacgaaatagacagatcgctgagataggtgcctcactgattaagcattggtaactgtcagaccaagtttactcatatatactttagattgatttaaaacttcatttttaatttaaaaggatctaggtgaagatcctttttgataatctcatgaccaaaatcccttaacgtgagttttcgttccactgagcgtcagaccccgtagaaaagatcaaaggatcttcttgagatcctttttttctgcgcgtaatctgctgcttgcaaacaaaaaaaccaccgctaccagcggtggtttgtttgccggatcaagagctaccaactctttttccgaaggtaactggcttcagcagagcgcagataccaaatactgttcttctagtgtagccgtagttaggccaccacttcaagaactctgtagcaccgcctacatacctcgctctgctaatcctgttaccagtggctgctgccagtggcgataagtcgtgtcttaccgggttggactcaagacgatagttaccggataaggcgcagcggtcgggctgaacggggggttcgtgcacacagcccagcttggagcgaacgacctacaccgaactgagatacctacagcgtgagctatgagaaagcgccacgcttcccgaagggagaaaggcggacaggtatccggtaagcggcagggtcggaacaggagagcgcacgagggagcttccagggggaaacgcctggtatctttatagtcctgtcgggtttcgccacctctgacttgagcgtcgatttttgtgatgctcgtcaggggggcggagcctatggaaaaacgccagcaacgcggcctttttacggttcctggccttttgctggccttttgctcacatgttctttcctgcgttatcccctgattctgtggataaccgtattaccgcctttgagtgagctgataccgctcgccgcagccgaacgaccgagcgcagcgagtcagtgagcgaggaagcggaagagcgcccaatacgcaaaccgcctctccccgcgcgttggccgattcattaatgcagctggcacgacaggtttcccgactggaaagcgggcagtgagcgcaacgcaattaatgtgagttagctcactcattaggcaccccaggctttacactttatgcttccggctcgtatgttgtgtggaattgtgagcggataacaatttcacacaggaaacagctatgaccatgattacgccaagcgcgcaattaaccctcactaaagggaacaaaagctggagctgcaagcttaatgtagtcttatgcaatactcttgtagtcttgcaacatggtaacgatgagttagcaacatgccttacaaggagagaaaaagcaccgtgcatgccgattggtggaagtaaggtggtacgatcgtgccttattaggaaggcaacagacgggtctgacatggattggacgaaccactgaattgccgcattgcagagatattgtatttaagtgcctagctcgatacataaacgggtctctctggttagaccagatctgagcctgggagctctctggctaactagggaacccactgcttaagcctcaataaagcttgccttgagtgcttcaagtagtgtgtgcccgtctgttgtgtgactctggtaactagagatccctcagacccttttagtcagtgtggaaaatctctagcagtggcgcccgaacagggacttgaaagcgaaagggaaaccagaggagctctctcgacgcaggactcggcttgctgaagcgcgcacggcaagaggcgaggggcggcgactggtgagtacgccaaaaattttgactagcggaggctagaaggagagagatgggtgcgagagcgtcagtattaagcgggggagaattagatcgcgatgggaaaaaattcggttaaggccagggggaaagaaaaaatataaattaaaacatatagtatgggcaagcagggagctagaacgattcgcagttaatcctggcctgttagaaacatcagaaggctgtagacaaatactgggacagctacaaccatcccttcagacaggatcagaagaacttagatcattatataatacagtagcaaccctctattgtgtgcatcaaaggatagagataaaagacaccaaggaagctttagacaagatagaggaagagcaaaacaaaagtaagaccaccgcacagcaagcggccgctgatcttcagacctggaggaggagatatgagggacaattggagaagtgaattatataaatataaagtagtaaaaattgaaccattaggagtagcacccaccaaggcaaagagaagagtggtgcagagagaaaaaagagcagtgggaataggagctttgttccttgggttcttgggagcagcaggaagcactatgggcgcagcgtcaatgacgctgacggtacaggccagacaattattgtctggtatagtgcagcagcagaacaatttgctgagggctattgaggcgcaacagcatctgttgcaactcacagtctggggcatcaagcagctccaggcaagaatcctggctgtggaaagatacctaaaggatcaacagctcctggggatttggggttgctctggaaaactcatttgcaccactgctgtgccttggaatgctagttggagtaataaatctctggaacagatttggaatcacacgacctggatggagtgggacagagaaattaacaattacacaagcttaatacactccttaattgaagaatcgcaaaaccagcaagaaaagaatgaacaagaattattggaattagataaatgggcaagtttgtggaattggtttaacataacaaattggctgtggtatataaaattattcataatgatagtaggaggcttggtaggtttaagaatagtttttgctgtactttctatagtgaatagagttaggcagggatattcaccattatcgtttcagacccacctcccaaccccgaggggacccttgcgccttttccaaggcagccctgggtttgcgcagggacgcggctgctctgggcgtggttccgggaaacgcagcggcgccgaccctgggtctcgcacattcttcacgtccgttcgcagcgtcacccggatcttcgccgctacccttgtgggccccccggcgacgcttcctgctccgcccctaagtcgggaaggttccttgcggttcgcggcgtgccggacgtgacaaacggaagccgcacgtctcactagtaccctcgcagacggacagcgccagggagcaatggcagcgcgccgaccgcgatgggctgtggccaatagcggctgctcagcagggcgcgccgagagcagcggccgggaaggggcggtgcgggaggcggggtgtggggcggtagtgtgggccctgttcctgcccgcgcggtgttccgcattctgcaagcctccggagcgcacgtcggcagtcggctccctcgttgaccgaatcaccgacctctctccccagggggtacccagctgtctagagaattctagatcttgagacaaatggcagtattcatccacaattttaaaagaaaaggggggattggggggtacagtgcaggggaaagaatagtagacataatagcaacagacatacaaactaaagaattacaaaaacaaattacaaaaattcaaaattttcgggtttattacagggacagcagagatccactttggcgccggctcgaggggg

SEQ ID NO: 107 - DNA, 9522 bp, Artificial Sequence
  Synthetic Polynucleotide
cccggggttattaatagtaatcaattacggggtcattagttcatagcccatatatggagttccgcgttacataacttacggtaaatggcccgcctggctgaccgcccaacgacccccgcccattgacgtcaataatgacgtatgttcccatagtaacgccaatagggactttccattgacgtcaatgggtggagtatttacggtaaactgcccacttggcagtacatcaagtgtatcatatgccaagtacgccccctattgacgtcaatgacggtaaatggcccgcctggcattatgcccagtacatgaccttatgggactttcctacttggcagtacatctacgtattagtcatcgctattaccatggtgatgcggttttggcagtacatcaatgggcgtggatagcggtttgactcacggggatttccaagtctccaccccattgacgtcaatgggagtttgttttggcaccaaaatcaacgggactttccaaaatgtcgtaacaactccgccccattgacgcaaatgggcggtaggcgtgtacggtgggaggtctatataagcagagctctctggctaactgtcgggatcaacaagtttgtacaaaaaagcaggctccgaattcaccggtgccgccaccatggtgagcaagggcgaggaggataacatggccatcatcaaggagttcatgcgcttcaaggtgcacatggagggctccgtgaacggccacgagttcgagatcgagggcgagggcgagggccgcccctacgagggcacccagaccgccaagctgaaggtgaccaagggtggccccctgcccttcgcctgggacatcctgtcccctcagttcatgtacggctccaaggcctacgtgaagcaccccgccgacatccccgactacttgaagctgtccttccccgagggcttcaagtgggagcgcgtgatgaacttcgaggacggcggcgtggtgaccgtgacccaggactcctccctgcaggacggcgagttcatctacaaggtgaagctgcgcggcaccaacttcccctccgacggccccgtaatgcagaagaagaccatgggctgggaggcctcctccgagcggatgtaccccgaggacggcgccctgaagggcgagatcaagcagaggctgaagctgaaggacggcggccactacgacgctgaggtcaagaccacctacaaggccaagaagcccgtgcagctgcccggcgcctacaacgtcaacattaagttggacatcacctcccacaacgaggactacaccatcgtggaacagtacgaacgcgccgagggccgccactccaccggcggcatggacgagctgtacaagtgattaattaagaattcgacccagctttcttgtacaaagtggttggtaagcctatccctaaccctctcctcggtctcgattctacgtagtaatgagctagcagtctcgaggttaacgaattccgccccccccctaacgttactggccgaagccgcttggaataaggccggtgtgcgcttgtctatatgttattttccaccatattgccgtcttttggcaatgtgagggcccggaaacctggccctgtcttcttgacgagcattcctaggggtctttcccctctcgccaaaggaatgcaaggtctgttgaatgtcgtgaaggaagcagttcctctggaagcttcttgaagacaaacaacgtctgtagcgaccctttgcaggcagcggaaccccccacctggcgacaggtgcccctgcggccaaaagccacgtgtataagatacacctgcaaaggcggcacaaccccagtgccacgttgtgagttggatagttgtggaaagagtcaaatggctctcctcaagcgtattcaacaaggggctgaaggatgcccagaaggtaccccattgtatgggatctgatctggggcctcggtgcacatgctttacatgtgtttagtcgaggttaaaaaaacgtctaggccccccgaaccacggggacgtggttttcctttgaaaaacacgataataccatggccatgattaagatcgctacgcggaagtacctggggaaacagaacgtctacgacataggtgtggagcgcgatcacaactttgctctgaaaaatggatttatcgccagcaactgcatctcccgccgtgcacagggtgtcacgttgcaagacctgcctgaaaccgaactgcccgctgttctgcagccggtcgcggaggccatggatgcgatcgctgcggccgatcttagccagacgagcgggttcggcccattcggaccgcaaggaatcggtcaatacactacatggcgtgatttcatatgcgcgattgctgatccccatgtgtatcactggcaaactgtgatggacgacaccgtcagtgcgtccgtcgcgcaggctctcgatgagctgatgctttgggccgaggactgccccgaagtccggcacctcgtgcacgcggatttcggctccaacaatgtcctgacggacaatggccgcataacagcggtcattgactggagcgaggcgatgttcggggattcccaatacgaggtcgccaacatcttcttctggaggccgtggttggcttgtatggagcagcagacgcgctacttcgagcggaggcatccggagcttgcaggatcgccgcggctccgggcgtatatgctccgcattggtcttgaccaactctatcagagcttggttgacggcaatttcgatgatgcagcttgggcgcagggtcgatgcgacgcaatcgtccgatccggagccgggactgtcgggcgtacacaaatcgcccgcagaagcgcggccgtctggaccgatggctgtgtagaagtactcgccgatagtggaaaccgacgccccagcactcgtccgagggcaaaggaatagcaccggtggcgcgttaagtcgacaatcaacctctggattacaaaatttgtgaaagattgactggtattcttaactatgttgctccttttacgctatgtggatacgctgctttaatgcctttgtatcatgctattgcttcccgtatggctttcattttctcctccttgtataaatcctggttgctgtctctttatgaggagttgtggcccgttgtcaggcaacgtggcgtggtgtgcactgtgtttgctgacgcaacccccactggttggggcattgccaccacctgtcagctcctttccgggactttcgctttccccctccctattgccacggcggaactcatcgccgcctgccttgcccgctgctggacaggggctcggctgttgggcactgacaattccgtggtgttgtcggggaaatcatcgtcctttccttggctgctcgcctgtgttgccacctggattctgcgcgggacgtccttctgctacgtcccttcggccctcaatccagcggaccttccttcccgcggcctgctgccggctctgcggcctcttccgcgtcttcgccttcgccctcagacgagtcggatctccctttgggccgcctccccgcgtcgactttaagaccaatgacttacaaggcagctgtagatcttagccactttttaaaagaaaaggggggactggaagggctaattcactcccaacgaagacaagatctgctttttgcttgtactgggtctctctggttagaccagatctgagcctgggagctctctggctaactagggaacccactgcttaagcctcaataaagcttgccttgagtgcttcaagtagtgtgtgcccgtctgttgtgtgactctggtaactagagatccctcagacccttttagtcagtgtggaaaatctctagcagtacgtatagtagttcatgtcatcttattattcagtatttataacttgcaaagaaatgaatatcagagagtgagaggaacttgtttattgcagcttataatggttacaaataaagcaatagcatcacaaatttcacaaataaagcatttttttcactgcattctagttgtggtttgtccaaactcatcaatgtatcttatcatgtctggctctagctatcccgcccctaactccgcccatcccgcccctaactccgcccagttccgcccattctccgccccatggctgactaattttttttatttatgcagaggccgaggccgcctcggcctctgagctattccagaagtagtgaggaggcttttttggaggcctagggacgtacccaattcgccctatagtgagtcgtattacgcgcgctcactggccgtcgttttacaacgtcgtgactgggaaaaccctggcgttacccaacttaatcgccttgcagcacatccccctttcgccagctggcgtaatagcgaagaggcccgcaccgatcgcccttcccaacagttgcgcagcctgaatggcgaatgggacgcgccctgtagcggcgcattaagcgcggcgggtgtggtggttacgcgcagcgtgaccgctacacttgccagcgccctagcgcccgctcctttcgctttcttcccttcctttctcgccacgttcgccggctttccccgtcaagctctaaatcgggggctccctttagggttccgatttagtgctttacggcacctcgaccccaaaaaacttgattagggtgatggttcacgtagtgggccatcgccctgatagacggtttttcgccctttgacgttggagtccacgttctttaatagtggactcttgttccaaactggaacaacactcaaccctatctcggtctattcttttgatttataagggattttgccgatttcggcctattggttaaaaaatgagctgatttaacaaaaatttaacgcgaattttaacaaaatattaacgcttacaatttaggtggcacttttcggggaaatgtgcgcggaacccctatttgtttatttttctaaatacattcaaatatgtatccgctcatgagacaataaccctgataaatgcttcaataatattgaaaaaggaagagtatgagtattcaacatttccgtgtcgcccttattcccttttttgcggcattttgccttcctgtttttgctcacccagaaacgctggtgaaagtaaaagatgctgaagatcagttgggtgcacgagtgggttacatcgaactggatctcaacagcggtaagatccttgagagttttcgccccgaagaacgttttccaatgatgagcacttttaaagttctgctatgtggcgcggtattatcccgtattgacgccgggcaagagcaactcggtcgccgcatacactattctcagaatgacttggttgagtactcaccagtcacagaaaagcatcttacggatggcatgacagtaagagaattatgcagtgctgccataaccatgagtgataacactgcggccaacttacttctgacaacgatcggaggaccgaaggagctaaccgcttttttgcacaacatgggggatcatgtaactcgccttgatcgttgggaaccggagctgaatgaagccataccaaacgacgagcgtgacaccacgatgcctgtagcaatggcaacaacgttgcgcaaactattaactggcgaactacttactctagcttcccggcaacaattaatagactggatggaggcggataaagttgcaggaccacttctgcgctcggcccttccggctggctggtttattgctgataaatctggagccggtgagcgtgggtctcgcggtatcattgcagcactggggccagatggtaagccctcccgtatcgtagttatctacacgacggggagtcaggcaactatggatgaacgaaatagacagatcgctgagataggtgcctcactgattaagcattggtaactgtcagaccaagtttactcatatatactttagattgatttaaaacttcatttttaatttaaaaggatctaggtgaagatcctttttgataatctcatgaccaaaatcccttaacgtgagttttcgttccactgagcgtcagaccccgtagaaaagatcaaaggatcttcttgagatcctttttttctgcgcgtaatctgctgcttgcaaacaaaaaaaccaccgctaccagcggtggtttgtttgccggatcaagagctaccaactctttttccgaaggtaactggcttcagcagagcgcagataccaaatactgttcttctagtgtagccgtagttaggccaccacttcaagaactctgtagcaccgcctacatacctcgctctgctaatcctgttaccagtggctgctgccagtggcgataagtcgtgtcttaccgggttggactcaagacgatagttaccggataaggcgcagcggtcgggctgaacggggggttcgtgcacacagcccagcttggagcgaacgacctacaccgaactgagatacctacagcgtgagctatgagaaagcgccacgcttcccgaagggagaaaggcggacaggtatccggtaagcggcagggtcggaacaggagagcgcacgagggagcttccagggggaaacgcctggtatctttatagtcctgtcgggtttcgccacctctgacttgagcgtcgatttttgtgatgctcgtcaggggggcggagcctatggaaaaacgccagcaacgcggcctttttacggttcctggccttttgctggccttttgctcacatgttctttcctgcgttatcccctgattctgtggataaccgtattaccgcctttgagtgagctgataccgctcgccgcagccgaacgaccgagcgcagcgagtcagtgagcgaggaagcggaagagcgcccaatacgcaaaccgcctctccccgcgcgttggccgattcattaatgcagctggcacgacaggtttcccgactggaaagcgggcagtgagcgcaacgcaattaatgtgagttagctcactcattaggcaccccaggctttacactttatgcttccggctcgtatgttgtgtggaattgtgagcggataacaatttcacacaggaaacagctatgaccatgattacgccaagcgcgcaattaaccctcactaaagggaacaaaagctggagctgcaagcttaatgtagtcttatgcaatactcttgtagtcttgcaacatggtaacgatgagttagcaacatgccttacaaggagagaaaaagcaccgtgcatgccgattggtggaagtaaggtggtacgatcgtgccttattaggaaggcaacagacgggtctgacatggattggacgaaccactgaattgccgcattgcagagatattgtatttaagtgcctagctcgatacataaacgggtctctctggttagaccagatctgagcctgggagctctctggctaactagggaacccactgcttaagcctcaataaagcttgccttgagtgcttcaagtagtgtgtgcccgtctgttgtgtgactctggtaactagagatccctcagacccttttagtcagtgtggaaaatctctagcagtggcgcccgaacagggacttgaaagcgaaagggaaaccagaggagctctctcgacgcaggactcggcttgctgaagcgcgcacggcaagaggcgaggggcggcgactggtgagtacgccaaaaattttgactagcggaggctagaaggagagagatgggtgcgagagcgtcagtattaagcgggggagaattagatcgcgatgggaaaaaattcggttaaggccagggggaaagaaaaaatataaattaaaacatatagtatgggcaagcagggagctagaacgattcgcagttaatcctggcctgttagaaacatcagaaggctgtagacaaatactgggacagctacaaccatcccttcagacaggatcagaagaacttagatcattatataatacagtagcaaccctctattgtgtgcatcaaaggatagagataaaagacaccaaggaagctttagacaagatagaggaagagcaaaacaaaagtaagaccaccgcacagcaagcggccgctgatcttcagacctggaggaggagatatgagggacaattggagaagtgaattatataaatataaagtagtaaaaattgaaccattaggagtagcacccaccaaggcaaagagaagagtggtgcagagagaaaaaagagcagtgggaataggagctttgttccttgggttcttgggagcagcaggaagcactatgggcgcagcgtcaatgacgctgacggtacaggccagacaattattgtctggtatagtgcagcagcagaacaatttgctgagggctattgaggcgcaacagcatctgttgcaactcacagtctggggcatcaagcagctccaggcaagaatcctggctgtggaaagatacctaaaggatcaacagctcctggggatttggggttgctctggaaaactcatttgcaccactgctgtgccttggaatgctagttggagtaataaatctctggaacagatttggaatcacacgacctggatggagtgggacagagaaattaacaattacacaagcttaatacactccttaattgaagaatcgcaaaaccagcaagaaaagaatgaacaagaattattggaattagataaatgggcaagtttgtggaattggtttaacataacaaattggctgtggtatataaaattattcataatgatagtaggaggcttggtaggtttaagaatagtttttgctgtactttctatagtgaatagagttaggcagggatattcaccattatcgtttcagacccacctcccaaccccgaggggacccttgcgccttttccaaggcagccctgggtttgcgcagggacgcggctgctctgggcgtggttccgggaaacgcagcggcgccgaccctgggtctcgcacattcttcacgtccgttcgcagcgtcacccggatcttcgccgctacccttgtgggccccccggcgacgcttcctgctccgcccctaagtcgggaaggttccttgcggttcgcggcgtgccggacgtgacaaacggaagccgcacgtctcactagtaccctcgcagacggacagcgccagggagcaatggcagcgcgccgaccgcgatgggctgtggccaatagcggctgctcagcagggcgcgccgagagcagcggccgggaaggggcggtgcgggaggcggggtgtggggcggtagtgtgggccctgttcctgcccgcgcggtgttccgcattctgcaagcctccggagcgcacgtcggcagtcggctccctcgttgaccgaatcaccgacctctctccccagggggtacccagctgtctagagaattctagatcttgagacaaatggcagtattcatccacaattttaaaagaaaaggggggattggggggtacagtgcaggggaaagaatagtagacataatagcaacagacatacaaactaaagaattacaaaaacaaattacaaaaattcaaaattttcgggtttattacagggacagcagagatccactttggcgccggctcgaggggg

SEQ ID NO: 108 - DNA, 10232 bp, Artificial Sequence
  Synthetic Polynucleotide
cccggggttattaatagtaatcaattacggggtcattagttcatagcccatatatggagttccgcgttacataacttacggtaaatggcccgcctggctgaccgcccaacgacccccgcccattgacgtcaataatgacgtatgttcccatagtaacgccaatagggactttccattgacgtcaatgggtggagtatttacggtaaactgcccacttggcagtacatcaagtgtatcatatgccaagtacgccccctattgacgtcaatgacggtaaatggcccgcctggcattatgcccagtacatgaccttatgggactttcctacttggcagtacatctacgtattagtcatcgctattaccatggtgatgcggttttggcagtacatcaatgggcgtggatagcggtttgactcacggggatttccaagtctccaccccattgacgtcaatgggagtttgttttggcaccaaaatcaacgggactttccaaaatgtcgtaacaactccgccccattgacgcaaatgggcggtaggcgtgtacggtgggaggtctatataagcagagctctctggctaactgtcgggatcaacaagtttgtacaaaaaagctgaacgagaaacgtaaaatgatataaatatcaatatattaaattagattttgcataaaaaacagactacataatactgtaaaacacaacatatccagtcactatggcggccgcattaggcaccccaggctttacactttatgcttccggctcgtataatgtgtggattttgagttaggatccgtcgagattttcaggagctaaggaagctaaaatggagaaaaaaatcactggatataccaccgttgatatatcccaatggcatcgtaaagaacattttgaggcatttcagtcagttgctcaatgtacctataaccagaccgttcagctggatattacggcctttttaaagaccgtaaagaaaaataagcacaagttttatccggcctttattcacattcttgcccgcctgatgaatgctcatccggaattccgtatggcaatgaaagacggtgagctggtgatatgggatagtgttcacccttgttacaccgttttccatgagcaaactgaaacgttttcatcgctctggagtgaataccacgacgatttccggcagtttctacacatatattcgcaagatgtggcgtgttacggtgaaaacctggcctatttccctaaagggtttattgagaatatgtttttcgtctcagccaatccctgggtgagtttcaccagttttgatttaaacgtggccaatatggacaacttcttcgcccccgttttcaccatgggcaaatattatacgcaaggcgacaaggtgctgatgccgctggcgattcaggttcatcatgccgtttgtgatggcttccatgtcggcagaatgcttaatgaattacaacagtactgcgatgagtggcagggcggggcgtaaagatctggatccggcttactaaaagccagataacagtatgcgtatttgcgcgctgatttttgcggtataagaatatatactgatatgtatacccgaagtatgtcaaaaagaggtatgctatgaagcagcgtattacagtgacagttgacagcgacagctatcagttgctcaaggcatatatgatgtcaatatctccggtctggtaagcacaaccatgcagaatgaagcccgtcgtctgcgtgccgaacgctggaaagcggaaaatcaggaagggatggctgaggtcgcccggtttattgaaatgaacggctcttttgctgacgagaacaggggctggtgaaatgcagtttaaggtttacacctataaaagagagagccgttatcgtctgtttgtggatgtacagagtgatattattgacacgcccgggcgacggatggtgatccccctggccagtgcacgtctgctgtcagataaagtctcccgtgaactttacccggtggtgcatatcggggatgaaagctggcgcatgatgaccaccgatatggccagtgtgccggtctccgttatcggggaagaagtggctgatctcagccaccgcgaaaatgacatcaaaaacgccattaacctgatgttctggggaatataaatgtcaggctcccttatacacagccagtctgcaggtcgaccatagtgactggatatgttgtgttttacagtattatgtagtctgttttttatgcaaaatctaatttaatatattgatatttatatcattttacgtttctcgttcagctttcttgtacaaagtggttggtaagcctatccctaaccctctcctcggtctcgattctacgtagtaatgagctagcagtctcgaggttaacgaattccgccccccccctaacgttactggccgaagccgcttggaataaggccggtgtgcgcttgtctatatgttattttccaccatattgccgtcttttggcaatgtgagggcccggaaacctggccctgtcttcttgacgagcattcctaggggtctttcccctctcgccaaaggaatgcaaggtctgttgaatgtcgtgaaggaagcagttcctctggaagcttcttgaagacaaacaacgtctgtagcgaccctttgcaggcagcggaaccccccacctggcgacaggtgcccctgcggccaaaagccacgtgtataagatacacctgcaaaggcggcacaaccccagtgccacgttgtgagttggatagttgtggaaagagtcaaatggctctcctcaagcgtattcaacaaggggctgaaggatgcccagaaggtaccccattgtatgggatctgatctggggcctcggtgcacatgctttacatgtgtttagtcgaggttaaaaaaacgtctaggccccccgaaccacggggacgtggttttcctttgaaaaacacgataataccatggccatgaccgagtacaagcccacggtgcgcctcgccacccgcgacgacgtccccagggccgtacgcaccctcgccgccgcgttcgccgactaccccgccacgcgccacaccgtcgatccggaccgccacatcgagcgggtcaccgagctgcaagaactcttcctcacgcgcgtcgggctcgacatcggcaaggtgtgggtcgcggacgacggcgccgcggtggcggtctggaccacgccggagagcgtcgaagcgggggcggtgttcgccgagatcggcccgcgcatggccgagttgagcggttcccggctggccgcgcagcaacagatggaaggcctcctggcgccgcaccggcccaagtgcctttcatacgagaccgagatcctgactgtcgagtacggattgcttcctatcggcaaaatcgtggagaagaggattgaatgtaccgtctattcagtcgataataatgggaacatctacacacagcccgtggctcaatggcacgacagaggagagcaggaagtttttgaatactgtctcgaggacggatccctcatccgcgctactaaagatcataagtttatgaccgtggacggccagatgctgccaattgacgaaatttttgaacgagagctggatctgatgagagtcgacaaccttccaaactgagaattcaccggtggcgcgttaagtcgacaatcaacctctggattacaaaatttgtgaaagattgactggtattcttaactatgttgctccttttacgctatgtggatacgctgctttaatgcctttgtatcatgctattgcttcccgtatggctttcattttctcctccttgtataaatcctggttgctgtctctttatgaggagttgtggcccgttgtcaggcaacgtggcgtggtgtgcactgtgtttgctgacgcaacccccactggttggggcattgccaccacctgtcagctcctttccgggactttcgctttccccctccctattgccacggcggaactcatcgccgcctgccttgcccgctgctggacaggggctcggctgttgggcactgacaattccgtggtgttgtcggggaaatcatcgtcctttccttggctgctcgcctgtgttgccacctggattctgcgcgggacgtccttctgctacgtcccttcggccctcaatccagcggaccttccttcccgcggcctgctgccggctctgcggcctcttccgcgtcttcgccttcgccctcagacgagtcggatctccctttgggccgcctccccgcgtcgactttaagaccaatgacttacaaggcagctgtagatcttagccactttttaaaagaaaaggggggactggaagggctaattcactcccaacgaagacaagatctgctttttgcttgtactgggtctctctggttagaccagatctgagcctgggagctctctggctaactagggaacccactgcttaagcctcaataaagcttgccttgagtgcttcaagtagtgtgtgcccgtctgttgtgtgactctggtaactagagatccctcagacccttttagtcagtgtggaaaatctctagcagtacgtatagtagttcatgtcatcttattattcagtatttataacttgcaaagaaatgaatatcagagagtgagaggaacttgtttattgcagcttataatggttacaaataaagcaatagcatcacaaatttcacaaataaagcatttttttcactgcattctagttgtggtttgtccaaactcatcaatgtatcttatcatgtctggctctagctatcccgcccctaactccgcccatcccgcccctaactccgcccagttccgcccattctccgccccatggctgactaattttttttatttatgcagaggccgaggccgcctcggcctctgagctattccagaagtagtgaggaggcttttttggaggcctagggacgtacccaattcgccctatagtgagtcgtattacgcgcgctcactggccgtcgttttacaacgtcgtgactgggaaaaccctggcgttacccaacttaatcgccttgcagcacatccccctttcgccagctggcgtaatagcgaagaggcccgcaccgatcgcccttcccaacagttgcgcagcctgaatggcgaatgggacgcgccctgtagcggcgcattaagcgcggcgggtgtggtggttacgcgcagcgtgaccgctacacttgccagcgccctagcgcccgctcctttcgctttcttcccttcctttctcgccacgttcgccggctttccccgtcaagctctaaatcgggggctccctttagggttccgatttagtgctttacggcacctcgaccccaaaaaacttgattagggtgatggttcacgtagtgggccatcgccctgatagacggtttttcgccctttgacgttggagtccacgttctttaatagtggactcttgttccaaactggaacaacactcaaccctatctcggtctattcttttgatttataagggattttgccgatttcggcctattggttaaaaaatgagctgatttaacaaaaatttaacgcgaattttaacaaaatattaacgcttacaatttaggtggcacttttcggggaaatgtgcgcggaacccctatttgtttatttttctaaatacattcaaatatgtatccgctcatgagacaataaccctgataaatgcttcaataatattgaaaaaggaagagtatgagtattcaacatttccgtgtcgcccttattcccttttttgcggcattttgccttcctgtttttgctcacccagaaacgctggtgaaagtaaaagatgctgaagatcagttgggtgcacgagtgggttacatcgaactggatctcaacagcggtaagatccttgagagttttcgccccgaagaacgttttccaatgatgagcacttttaaagttctgctatgtggcgcggtattatcccgtattgacgccgggcaagagcaactcggtcgccgcatacactattctcagaatgacttggttgagtactcaccagtcacagaaaagcatcttacggatggcatgacagtaagagaattatgcagtgctgccataaccatgagtgataacactgcggccaacttacttctgacaacgatcggaggaccgaaggagctaaccgcttttttgcacaacatgggggatcatgtaactcgccttgatcgttgggaaccggagctgaatgaagccataccaaacgacgagcgtgacaccacgatgcctgtagcaatggcaacaacgttgcgcaaactattaactggcgaactacttactctagcttcccggcaacaattaatagactggatggaggcggataaagttgcaggaccacttctgcgctcggcccttccggctggctggtttattgctgataaatctggagccggtgagcgtgggtctcgcggtatcattgcagcactggggccagatggtaagccctcccgtatcgtagttatctacacgacggggagtcaggcaactatggatgaacgaaatagacagatcgctgagataggtgcctcactgattaagcattggtaactgtcagaccaagtttactcatatatactttagattgatttaaaacttcatttttaatttaaaaggatctaggtgaagatcctttttgataatctcatgaccaaaatcccttaacgtgagttttcgttccactgagcgtcagaccccgtagaaaagatcaaaggatcttcttgagatcctttttttctgcgcgtaatctgctgcttgcaaacaaaaaaaccaccgctaccagcggtggtttgtttgccggatcaagagctaccaactctttttccgaaggtaactggcttcagcagagcgcagataccaaatactgttcttctagtgtagccgtagttaggccaccacttcaagaactctgtagcaccgcctacatacctcgctctgctaatcctgttaccagtggctgctgccagtggcgataagtcgtgtcttaccgggttggactcaagacgatagttaccggataaggcgcagcggtcgggctgaacggggggttcgtgcacacagcccagcttggagcgaacgacctacaccgaactgagatacctacagcgtgagctatgagaaagcgccacgcttcccgaagggagaaaggcggacaggtatccggtaagcggcagggtcggaacaggagagcgcacgagggagcttccagggggaaacgcctggtatctttatagtcctgtcgggtttcgccacctctgacttgagcgtcgatttttgtgatgctcgtcaggggggcggagcctatggaaaaacgccagcaacgcggcctttttacggttcctggccttttgctggccttttgctcacatgttctttcctgcgttatcccctgattctgtggataaccgtattaccgcctttgagtgagctgataccgctcgccgcagccgaacgaccgagcgcagcgagtcagtgagcgaggaagcggaagagcgcccaatacgcaaaccgcctctccccgcgcgttggccgattcattaatgcagctggcacgacaggtttcccgactggaaagcgggcagtgagcgcaacgcaattaatgtgagttagctcactcattaggcaccccaggctttacactttatgcttccggctcgtatgttgtgtggaattgtgagcggataacaatttcacacaggaaacagctatgaccatgattacgccaagcgcgcaattaaccctcactaaagggaacaaaagctggagctgcaagcttaatgtagtcttatgcaatactcttgtagtcttgcaacatggtaacgatgagttagcaacatgccttacaaggagagaaaaagcaccgtgcatgccgattggtggaagtaaggtggtacgatcgtgccttattaggaaggcaacagacgggtctgacatggattggacgaaccactgaattgccgcattgcagagatattgtatttaagtgcctagctcgatacataaacgggtctctctggttagaccagatctgagcctgggagctctctggctaactagggaacccactgcttaagcctcaataaagcttgccttgagtgcttcaagtagtgtgtgcccgtctgttgtgtgactctggtaactagagatccctcagacccttttagtcagtgtggaaaatctctagcagtggcgcccgaacagggacttgaaagcgaaagggaaaccagaggagctctctcgacgcaggactcggcttgctgaagcgcgcacggcaagaggcgaggggcggcgactggtgagtacgccaaaaattttgactagcggaggctagaaggagagagatgggtgcgagagcgtcagtattaagcgggggagaattagatcgcgatgggaaaaaattcggttaaggccagggggaaagaaaaaatataaattaaaacatatagtatgggcaagcagggagctagaacgattcgcagttaatcctggcctgttagaaacatcagaaggctgtagacaaatactgggacagctacaaccatcccttcagacaggatcagaagaacttagatcattatataatacagtagcaaccctctattgtgtgcatcaaaggatagagataaaagacaccaaggaagctttagacaagatagaggaagagcaaaacaaaagtaagaccaccgcacagcaagcggccgctgatcttcagacctggaggaggagatatgagggacaattggagaagtgaattatataaatataaagtagtaaaaattgaaccattaggagtagcacccaccaaggcaaagagaagagtggtgcagagagaaaaaagagcagtgggaataggagctttgttccttgggttcttgggagcagcaggaagcactatgggcgcagcgtcaatgacgctgacggtacaggccagacaattattgtctggtatagtgcagcagcagaacaatttgctgagggctattgaggcgcaacagcatctgttgcaactcacagtctggggcatcaagcagctccaggcaagaatcctggctgtggaaagatacctaaaggatcaacagctcctggggatttggggttgctctggaaaactcatttgcaccactgctgtgccttggaatgctagttggagtaataaatctctggaacagatttggaatcacacgacctggatggagtgggacagagaaattaacaattacacaagcttaatacactccttaattgaagaatcgcaaaaccagcaagaaaagaatgaacaagaattattggaattagataaatgggcaagtttgtggaattggtttaacataacaaattggctgtggtatataaaattattcataatgatagtaggaggcttggtaggtttaagaatagtttttgctgtactttctatagtgaatagagttaggcagggatattcaccattatcgtttcagacccacctcccaaccccgaggggacccttgcgccttttccaaggcagccctgggtttgcgcagggacgcggctgctctgggcgtggttccgggaaacgcagcggcgccgaccctgggtctcgcacattcttcacgtccgttcgcagcgtcacccggatcttcgccgctacccttgtgggccccccggcgacgcttcctgctccgcccctaagtcgggaaggttccttgcggttcgcggcgtgccggacgtgacaaacggaagccgcacgtctcactagtaccctcgcagacggacagcgccagggagcaatggcagcgcgccgaccgcgatgggctgtggccaatagcggctgctcagcagggcgcgccgagagcagcggccgggaaggggcggtgcgggaggcggggtgtggggcggtagtgtgggccctgttcctgcccgcgcggtgttccgcattctgcaagcctccggagcgcacgtcggcagtcggctccctcgttgaccgaatcaccgacctctctccccagggggtacccagctgtctagagaattctagatcttgagacaaatggcagtattcatccacaattttaaaagaaaaggggggattggggggtacagtgcaggggaaagaatagtagacataatagcaacagacatacaaactaaagaattacaaaaacaaattacaaaaattcaaaattttcgggtttattacagggacagcagagatccactttggcgccggctcgaggggg

SEQ ID NO: 109 - protein, 223 aa, Artificial Sequence
  Synthetic Polypeptide
MAMTEYKPTVRLATRDDVPRAVRTLAAAFADYPATRHTVDPDRHIERVTELQELFLTRVGLDIGKVWVADDGAAVAVWTTPESVEAGAVFAEIGPRMAELSGSRLAAQQQMEGLLAPHRPKCLSYETEILTVEYGLLPIGKIVEKRIECTVYSVDNNGNIYTQPVAQWHDRGEQEVFEYCLEDGSLIRATKDHKFMTVDGQMLPIDEIFERELDLMRVDNLPN

SEQ ID NO: 110 - DNA, 9920 bp, Artificial Sequence
  Synthetic Polynucleotide
cccggggttattaatagtaatcaattacggggtcattagttcatagcccatatatggagttccgcgttacataacttacggtaaatggcccgcctggctgaccgcccaacgacccccgcccattgacgtcaataatgacgtatgttcccatagtaacgccaatagggactttccattgacgtcaatgggtggagtatttacggtaaactgcccacttggcagtacatcaagtgtatcatatgccaagtacgccccctattgacgtcaatgacggtaaatggcccgcctggcattatgcccagtacatgaccttatgggactttcctacttggcagtacatctacgtattagtcatcgctattaccatggtgatgcggttttggcagtacatcaatgggcgtggatagcggtttgactcacggggatttccaagtctccaccccattgacgtcaatgggagtttgttttggcaccaaaatcaacgggactttccaaaatgtcgtaacaactccgccccattgacgcaaatgggcggtaggcgtgtacggtgggaggtctatataagcagagctctctggctaactgtcgggatcaacaagtttgtacaaaaaagctgaacgagaaacgtaaaatgatataaatatcaatatattaaattagattttgcataaaaaacagactacataatactgtaaaacacaacatatccagtcactatggcggccgcattaggcaccccaggctttacactttatgcttccggctcgtataatgtgtggattttgagttaggatccgtcgagattttcaggagctaaggaagctaaaatggagaaaaaaatcactggatataccaccgttgatatatcccaatggcatcgtaaagaacattttgaggcatttcagtcagttgctcaatgtacctataaccagaccgttcagctggatattacggcctttttaaagaccgtaaagaaaaataagcacaagttttatccggcctttattcacattcttgcccgcctgatgaatgctcatccggaattccgtatggcaatgaaagacggtgagctggtgatatgggatagtgttcacccttgttacaccgttttccatgagcaaactgaaacgttttcatcgctctggagtgaataccacgacgatttccggcagtttctacacatatattcgcaagatgtggcgtgttacggtgaaaacctggcctatttccctaaagggtttattgagaatatgtttttcgtctcagccaatccctgggtgagtttcaccagttttgatttaaacgtggccaatatggacaacttcttcgcccccgttttcaccatgggcaaatattatacgcaaggcgacaaggtgctgatgccgctggcgattcaggttcatcatgccgtttgtgatggcttccatgtcggcagaatgcttaatgaattacaacagtactgcgatgagtggcagggcggggcgtaaagatctggatccggcttactaaaagccagataacagtatgcgtatttgcgcgctgatttttgcggtataagaatatatactgatatgtatacccgaagtatgtcaaaaagaggtatgctatgaagcagcgtattacagtgacagttgacagcgacagctatcagttgctcaaggcatatatgatgtcaatatctccggtctggtaagcacaaccatgcagaatgaagcccgtcgtctgcgtgccgaacgctggaaagcggaaaatcaggaagggatggctgaggtcgcccggtttattgaaatgaacggctcttttgctgacgagaacaggggctggtgaaatgcagtttaaggtttacacctataaaagagagagccgttatcgtctgtttgtggatgtacagagtgatattattgacacgcccgggcgacggatggtgatccccctggccagtgcacgtctgctgtcagataaagtctcccgtgaactttacccggtggtgcatatcggggatgaaagctggcgcatgatgaccaccgatatggccagtgtgccggtctccgttatcggggaagaagtggctgatctcagccaccgcgaaaatgacatcaaaaacgccattaacctgatgttctggggaatataaatgtcaggctcccttatacacagccagtctgcaggtcgaccatagtgactggatatgttgtgttttacagtattatgtagtctgttttttatgcaaaatctaatttaatatattgatatttatatcattttacgtttctcgttcagctttcttgtacaaagtggttggtaagcctatccctaaccctctcctcggtctcgattctacgtagtaatgagctagcagtctcgaggttaacgaattccgccccccccctaacgttactggccgaagccgcttggaataaggccggtgtgcgcttgtctatatgttattttccaccatattgccgtcttttggcaatgtgagggcccggaaacctggccctgtcttcttgacgagcattcctaggggtctttcccctctcgccaaaggaatgcaaggtctgttgaatgtcgtgaaggaagcagttcctctggaagcttcttgaagacaaacaacgtctgtagcgaccctttgcaggcagcggaaccccccacctggcgacaggtgcccctgcggccaaaagccacgtgtataagatacacctgcaaaggcggcacaaccccagtgccacgttgtgagttggatagttgtggaaagagtcaaatggctctcctcaagcgtattcaacaaggggctgaaggatgcccagaaggtaccccattgtatgggatctgatctggggcctcggtgcacatgctttacatgtgtttagtcgaggttaaaaaaacgtctaggccccccgaaccacggggacgtggttttcctttgaaaaacacgataataccatggccatgattaagatcgctacgcggaagtacctggggaaacagaacgtctacgacataggtgtggagcgcgatcacaactttgctctgaaaaatggatttatcgccagcaactgcgagcccgcgtggttcctggccaccgtcggcgtctcgcccgaccaccagggcaagggtctgggcagcgccgtcgtgctccccggagtggaggcggccgagcgcgccggggtgcccgccttcctggagacctccgcgccccgcaacctccccttctacgagcggctcggcttcaccgtcaccgccgacgtcgaggtgcccgaaggaccgcgcacctggtgcatgacccgcaagcccggtgcctgagaattcaccggtggcgcgttaagtcgacaatcaacctctggattacaaaatttgtgaaagattgactggtattcttaactatgttgctccttttacgctatgtggatacgctgctttaatgcctttgtatcatgctattgcttcccgtatggctttcattttctcctccttgtataaatcctggttgctgtctctttatgaggagttgtggcccgttgtcaggcaacgtggcgtggtgtgcactgtgtttgctgacgcaacccccactggttggggcattgccaccacctgtcagctcctttccgggactttcgctttccccctccctattgccacggcggaactcatcgccgcctgccttgcccgctgctggacaggggctcggctgttgggcactgacaattccgtggtgttgtcggggaaatcatcgtcctttccttggctgctcgcctgtgttgccacctggattctgcgcgggacgtccttctgctacgtcccttcggccctcaatccagcggaccttccttcccgcggcctgctgccggctctgcggcctcttccgcgtcttcgccttcgccctcagacgagtcggatctccctttgggccgcctccccgcgtcgactttaagaccaatgacttacaaggcagctgtagatcttagccactttttaaaagaaaaggggggactggaagggctaattcactcccaacgaagacaagatctgctttttgcttgtactgggtctctctggttagaccagatctgagcctgggagctctctggctaactagggaacccactgcttaagcctcaataaagcttgccttgagtgcttcaagtagtgtgtgcccgtctgttgtgtgactctggtaactagagatccctcagacccttttagtcagtgtggaaaatctctagcagtacgtatagtagttcatgtcatcttattattcagtatttataacttgcaaagaaatgaatatcagagagtgagaggaacttgtttattgcagcttataatggttacaaataaagcaatagcatcacaaatttcacaaataaagcatttttttcactgcattctagttgtggtttgtccaaactcatcaatgtatcttatcatgtctggctctagctatcccgcccctaactccgcccatcccgcccctaactccgcccagttccgcccattctccgccccatggctgactaattttttttatttatgcagaggccgaggccgcctcggcctctgagctattccagaagtagtgaggaggcttttttggaggcctagggacgtacccaattcgccctatagtgagtcgtattacgcgcgctcactggccgtcgttttacaacgtcgtgactgggaaaaccctggcgttacccaacttaatcgccttgcagcacatccccctttcgccagctggcgtaatagcgaagaggcccgcaccgatcgcccttcccaacagttgcgcagcctgaatggcgaatgggacgcgccctgtagcggcgcattaagcgcggcgggtgtggtggttacgcgcagcgtgaccgctacacttgccagcgccctagcgcccgctcctttcgctttcttcccttcctttctcgccacgttcgccggctttccccgtcaagctctaaatcgggggctccctttagggttccgatttagtgctttacggcacctcgaccccaaaaaacttgattagggtgatggttcacgtagtgggccatcgccctgatagacggtttttcgccctttgacgttggagtccacgttctttaatagtggactcttgttccaaactggaacaacactcaaccctatctcggtctattcttttgatttataagggattttgccgatttcggcctattggttaaaaaatgagctgatttaacaaaaatttaacgcgaattttaacaaaatattaacgcttacaatttaggtggcacttttcggggaaatgtgcgcggaacccctatttgtttatttttctaaatacattcaaatatgtatccgctcatgagacaataaccctgataaatgcttcaataatattgaaaaaggaagagtatgagtattcaacatttccgtgtcgcccttattcccttttttgcggcattttgccttcctgtttttgctcacccagaaacgctggtgaaagtaaaagatgctgaagatcagttgggtgcacgagtgggttacatcgaactggatctcaacagcggtaagatccttgagagttttcgccccgaagaacgttttccaatgatgagcacttttaaagttctgctatgtggcgcggtattatcccgtattgacgccgggcaagagcaactcggtcgccgcatacactattctcagaatgacttggttgagtactcaccagtcacagaaaagcatcttacggatggcatgacagtaagagaattatgcagtgctgccataaccatgagtgataacactgcggccaacttacttctgacaacgatcggaggaccgaaggagctaaccgcttttttgcacaacatgggggatcatgtaactcgccttgatcgttgggaaccggagctgaatgaagccataccaaacgacgagcgtgacaccacgatgcctgtagcaatggcaacaacgttgcgcaaactattaactggcgaactacttactctagcttcccggcaacaattaatagactggatggaggcggataaagttgcaggaccacttctgcgctcggcccttccggctggctggtttattgctgataaatctggagccggtgagcgtgggtctcgcggtatcattgcagcactggggccagatggtaagccctcccgtatcgtagttatctacacgacggggagtcaggcaactatggatgaacgaaatagacagatcgctgagataggtgcctcactgattaagcattggtaactgtcagaccaagtttactcatatatactttagattgatttaaaacttcatttttaatttaaaaggatctaggtgaagatcctttttgataatctcatgaccaaaatcccttaacgtgagttttcgttccactgagcgtcagaccccgtagaaaagatcaaaggatcttcttgagatcctttttttctgcgcgtaatctgctgcttgcaaacaaaaaaaccaccgctaccagcggtggtttgtttgccggatcaagagctaccaactctttttccgaaggtaactggcttcagcagagcgcagataccaaatactgttcttctagtgtagccgtagttaggccaccacttcaagaactctgtagcaccgcctacatacctcgctctgctaatcctgttaccagtggctgctgccagtggcgataagtcgtgtcttaccgggttggactcaagacgatagttaccggataaggcgcagcggtcgggctgaacggggggttcgtgcacacagcccagcttggagcgaacgacctacaccgaactgagatacctacagcgtgagctatgagaaagcgccacgcttcccgaagggagaaaggcggacaggtatccggtaagcggcagggtcggaacaggagagcgcacgagggagcttccagggggaaacgcctggtatctttatagtcctgtcgggtttcgccacctctgacttgagcgtcgatttttgtgatgctcgtcaggggggcggagcctatggaaaaacgccagcaacgcggcctttttacggttcctggccttttgctggccttttgctcacatgttctttcctgcgttatcccctgattctgtggataaccgtattaccgcctttgagtgagctgataccgctcgccgcagccgaacgaccgagcgcagcgagtcagtgagcgaggaagcggaagagcgcccaatacgcaaaccgcctctccccgcgcgttggccgattcattaatgcagctggcacgacaggtttcccgactggaaagcgggcagtgagcgcaacgcaattaatgtgagttagctcactcattaggcaccccaggctttacactttatgcttccggctcgtatgttgtgtggaattgtgagcggataacaatttcacacaggaaacagctatgaccatgattacgccaagcgcgcaattaaccctcactaaagggaacaaaagctggagctgcaagcttaatgtagtcttatgcaatactcttgtagtcttgcaacatggtaacgatgagttagcaacatgccttacaaggagagaaaaagcaccgtgcatgccgattggtggaagtaaggtggtacgatcgtgccttattaggaaggcaacagacgggtctgacatggattggacgaaccactgaattgccgcattgcagagatattgtatttaagtgcctagctcgatacataaacgggtctctctggttagaccagatctgagcctgggagctctctggctaactagggaacccactgcttaagcctcaataaagcttgccttgagtgcttcaagtagtgtgtgcccgtctgttgtgtgactctggtaactagagatccctcagacccttttagtcagtgtggaaaatctctagcagtggcgcccgaacagggacttgaaagcgaaagggaaaccagaggagctctctcgacgcaggactcggcttgctgaagcgcgcacggcaagaggcgaggggcggcgactggtgagtacgccaaaaattttgactagcggaggctagaaggagagagatgggtgcgagagcgtcagtattaagcgggggagaattagatcgcgatgggaaaaaattcggttaaggccagggggaaagaaaaaatataaattaaaacatatagtatgggcaagcagggagctagaacgattcgcagttaatcctggcctgttagaaacatcagaaggctgtagacaaatactgggacagctacaaccatcccttcagacaggatcagaagaacttagatcattatataatacagtagcaaccctctattgtgtgcatcaaaggatagagataaaagacaccaaggaagctttagacaagatagaggaagagcaaaacaaaagtaagaccaccgcacagcaagcggccgctgatcttcagacctggaggaggagatatgagggacaattggagaagtgaattatataaatataaagtagtaaaaattgaaccattaggagtagcacccaccaaggcaaagagaagagtggtgcagagagaaaaaagagcagtgggaataggagctttgttccttgggttcttgggagcagcaggaagcactatgggcgcagcgtcaatgacgctgacggtacaggccagacaattattgtctggtatagtgcagcagcagaacaatttgctgagggctattgaggcgcaacagcatctgttgcaactcacagtctggggcatcaagcagctccaggcaagaatcctggctgtggaaagatacctaaaggatcaacagctcctggggatttggggttgctctggaaaactcatttgcaccactgctgtgccttggaatgctagttggagtaataaatctctggaacagatttggaatcacacgacctggatggagtgggacagagaaattaacaattacacaagcttaatacactccttaattgaagaatcgcaaaaccagcaagaaaagaatgaacaagaattattggaattagataaatgggcaagtttgtggaattggtttaacataacaaattggctgtggtatataaaattattcataatgatagtaggaggcttggtaggtttaagaatagtttttgctgtactttctatagtgaatagagttaggcagggatattcaccattatcgtttcagacccacctcccaaccccgaggggacccttgcgccttttccaaggcagccctgggtttgcgcagggacgcggctgctctgggcgtggttccgggaaacgcagcggcgccgaccctgggtctcgcacattcttcacgtccgttcgcagcgtcacccggatcttcgccgctacccttgtgggccccccggcgacgcttcctgctccgcccctaagtcgggaaggttccttgcggttcgcggcgtgccggacgtgacaaacggaagccgcacgtctcactagtaccctcgcagacggacagcgccagggagcaatggcagcgcgccgaccgcgatgggctgtggccaatagcggctgctcagcagggcgcgccgagagcagcggccgggaaggggcggtgcgggaggcggggtgtggggcggtagtgtgggccctgttcctgcccgcgcggtgttccgcattctgcaagcctccggagcgcacgtcggcagtcggctccctcgttgaccgaatcaccgacctctctccccagggggtacccagctgtctagagaattctagatcttgagacaaatggcagtattcatccacaattttaaaagaaaaggggggattggggggtacagtgcaggggaaagaatagtagacataatagcaacagacatacaaactaaagaattacaaaaacaaattacaaaaattcaaaattttcgggtttattacagggacagcagagatccactttggcgccggctcgaggggg

SEQ ID NO: 111 - protein, 119 aa, Artificial Sequence
  Synthetic Polypeptide
MAMIKIATRKYLGKQNVYDIGVERDHNFALKNGFIASNCEPAWFLATVGVSPDHQGKGLGSAVVLPGVEAAERAGVPAFLETSAPRNLPFYERLGFTVTADVEVPEGPRTWCMTRKPGA

SEQ ID NO: 112 - DNA, 9317 bp, Artificial Sequence
  Synthetic Polynucleotide
cccggggttattaatagtaatcaattacggggtcattagttcatagcccatatatggagttccgcgttacataacttacggtaaatggcccgcctggctgaccgcccaacgacccccgcccattgacgtcaataatgacgtatgttcccatagtaacgccaatagggactttccattgacgtcaatgggtggagtatttacggtaaactgcccacttggcagtacatcaagtgtatcatatgccaagtacgccccctattgacgtcaatgacggtaaatggcccgcctggcattatgcccagtacatgaccttatgggactttcctacttggcagtacatctacgtattagtcatcgctattaccatggtgatgcggttttggcagtacatcaatgggcgtggatagcggtttgactcacggggatttccaagtctccaccccattgacgtcaatgggagtttgttttggcaccaaaatcaacgggactttccaaaatgtcgtaacaactccgccccattgacgcaaatgggcggtaggcgtgtacggtgggaggtctatataagcagagctctctggctaactgtcgggatcaacaagtttgtacaaaaaagcaggctccgaattcaccggtgccgccaccatgagcgagctgattaaggagaacatgcacatgaagctgtacatggagggcaccgtggacaaccatcacttcaagtgcacatccgagggcgaaggcaagccctacgagggcacccagaccatgagaatcaaggtggtcgagggcggccctctccccttcgccttcgacatcctggctactagcttcctctacggcagcaagaccttcatcaaccacacccagggcatccccgacttcttcaagcagtccttccctgagggcttcacatgggagagagtcaccacatacgaagacgggggcgtgctgaccgctacccaggacaccagcctccaggacggctgcctcatctacaacgtcaagatcagaggggtgaacttcacatccaacggccctgtgatgcagaagaaaacactcggctgggaggccttcaccgagacgctgtaccccgctgacggcggcctggaaggcagaaacgacatggccctgaagctcgtgggcgggagccatctgatcgcaaacatcaagaccacatatagatccaagaaacccgctaagaacctcaagatgcctggcgtctactatgtggactacagactggaaagaatcaaggaggccaacaacgagacctacgtcgagcagcacgaggtggcagtggccagatactgcgacctccctagcaaactggggcacaagcttaattaattaattaagaattcgacccagctttcttgtacaaagtggttggtaagcctatccctaaccctctcctcggtctcgattctacgtagtaatgagctagcagtctcgaggttaacgaattccgccccccccctaacgttactggccgaagccgcttggaataaggccggtgtgcgcttgtctatatgttattttccaccatattgccgtcttttggcaatgtgagggcccggaaacctggccctgtcttcttgacgagcattcctaggggtctttcccctctcgccaaaggaatgcaaggtctgttgaatgtcgtgaaggaagcagttcctctggaagcttcttgaagacaaacaacgtctgtagcgaccctttgcaggcagcggaaccccccacctggcgacaggtgcccctgcggccaaaagccacgtgtataagatacacctgcaaaggcggcacaaccccagtgccacgttgtgagttggatagttgtggaaagagtcaaatggctctcctcaagcgtattcaacaaggggctgaaggatgcccagaaggtaccccattgtatgggatctgatctggggcctcggtgcacatgctttacatgtgtttagtcgaggttaaaaaaacgtctaggccccccgaaccacggggacgtggttttcctttgaaaaacacgataataccatggccatgaccgagtacaagcccacggtgcgcctcgccacccgcgacgacgtccccagggccgtacgcaccctcgccgccgcgttcgccgactaccccgccacgcgccacaccgtcgatccggaccgccacatcgagcgggtcaccgagctgcaagaactcttcctcacgcgcgtcgggctcgacatcggcaaggtgtgggtcgcggacgacggcgccgcggtggcggtctggaccacgccggagagcgtcgaagcgggggcggtgttcgccgagatcggcccgcgcatggccgagttgagcggttcccggctggccgcgcagcaacagatggaaggcctcctggcgccgcaccggcccaagtgcctttcatacgagaccgagatcctgactgtcgagtacggattgcttcctatcggcaaaatcgtggagaagaggattgaatgtaccgtctattcagtcgataataatgggaacatctacacacagcccgtggctcaatggcacgacagaggagagcaggaagtttttgaatactgtctcgaggacggatccctcatccgcgctactaaagatcataagtttatgaccgtggacggccagatgctgccaattgacgaaatttttgaacgagagctggatctgatgagagtcgacaaccttccaaactgagaattcaccggtggcgcgttaagtcgacaatcaacctctggattacaaaatttgtgaaagattgactggtattcttaactatgttgctccttttacgctatgtggatacgctgctttaatgcctttgtatcatgctattgcttcccgtatggctttcattttctcctccttgtataaatcctggttgctgtctctttatgaggagttgtggcccgttgtcaggcaacgtggcgtggtgtgcactgtgtttgctgacgcaacccccactggttggggcattgccaccacctgtcagctcctttccgggactttcgctttccccctccctattgccacggcggaactcatcgccgcctgccttgcccgctgctggacaggggctcggctgttgggcactgacaattccgtggtgttgtcggggaaatcatcgtcctttccttggctgctcgcctgtgttgccacctggattctgcgcgggacgtccttctgctacgtcccttcggccctcaatccagcggaccttccttcccgcggcctgctgccggctctgcggcctcttccgcgtcttcgccttcgccctcagacgagtcggatctccctttgggccgcctccccgcgtcgactttaagaccaatgacttacaaggcagctgtagatcttagccactttttaaaagaaaaggggggactggaagggctaattcactcccaacgaagacaagatctgctttttgcttgtactgggtctctctggttagaccagatctgagcctgggagctctctggctaactagggaacccactgcttaagcctcaataaagcttgccttgagtgcttcaagtagtgtgtgcccgtctgttgtgtgactctggtaactagagatccctcagacccttttagtcagtgtggaaaatctctagcagtacgtatagtagttcatgtcatcttattattcagtatttataacttgcaaagaaatgaatatcagagagtgagaggaacttgtttattgcagcttataatggttacaaataaagcaatagcatcacaaatttcacaaataaagcatttttttcactgcattctagttgtggtttgtccaaactcatcaatgtatcttatcatgtctggctctagctatcccgcccctaactccgcccatcccgcccctaactccgcccagttccgcccattctccgccccatggctgactaattttttttatttatgcagaggccgaggccgcctcggcctctgagctattccagaagtagtgaggaggcttttttggaggcctagggacgtacccaattcgccctatagtgagtcgtattacgcgcgctcactggccgtcgttttacaacgtcgtgactgggaaaaccctggcgttacccaacttaatcgccttgcagcacatccccctttcgccagctggcgtaatagcgaagaggcccgcaccgatcgcccttcccaacagttgcgcagcctgaatggcgaatgggacgcgccctgtagcggcgcattaagcgcggcgggtgtggtggttacgcgcagcgtgaccgctacacttgccagcgccctagcgcccgctcctttcgctttcttcccttcctttctcgccacgttcgccggctttccccgtcaagctctaaatcgggggctccctttagggttccgatttagtgctttacggcacctcgaccccaaaaaacttgattagggtgatggttcacgtagtgggccatcgccctgatagacggtttttcgccctttgacgttggagtccacgttctttaatagtggactcttgttccaaactggaacaacactcaaccctatctcggtctattcttttgatttataagggattttgccgatttcggcctattggttaaaaaatgagctgatttaacaaaaatttaacgcgaattttaacaaaatattaacgcttacaatttaggtggcacttttcggggaaatgtgcgcggaacccctatttgtttatttttctaaatacattcaaatatgtatccgctcatgagacaataaccctgataaatgcttcaataatattgaaaaaggaagagtatgagtattcaacatttccgtgtcgcccttattcccttttttgcggcattttgccttcctgtttttgctcacccagaaacgctggtgaaagtaaaagatgctgaagatcagttgggtgcacgagtgggttacatcgaactggatctcaacagcggtaagatccttgagagttttcgccccgaagaacgttttccaatgatgagcacttttaaagttctgctatgtggcgcggtattatcccgtattgacgccgggcaagagcaactcggtcgccgcatacactattctcagaatgacttggttgagtactcaccagtcacagaaaagcatcttacggatggcatgacagtaagagaattatgcagtgctgccataaccatgagtgataacactgcggccaacttacttctgacaacgatcggaggaccgaaggagctaaccgcttttttgcacaacatgggggatcatgtaactcgccttgatcgttgggaaccggagctgaatgaagccataccaaacgacgagcgtgacaccacgatgcctgtagcaatggcaacaacgttgcgcaaactattaactggcgaactacttactctagcttcccggcaacaattaatagactggatggaggcggataaagttgcaggaccacttctgcgctcggcccttccggctggctggtttattgctgataaatctggagccggtgagcgtgggtctcgcggtatcattgcagcactggggccagatggtaagccctcccgtatcgtagttatctacacgacggggagtcaggcaactatggatgaacgaaatagacagatcgctgagataggtgcctcactgattaagcattggtaactgtcagaccaagtttactcatatatactttagattgatttaaaacttcatttttaatttaaaaggatctaggtgaagatcctttttgataatctcatgaccaaaatcccttaacgtgagttttcgttccactgagcgtcagaccccgtagaaaagatcaaaggatcttcttgagatcctttttttctgcgcgtaatctgctgcttgcaaacaaaaaaaccaccgctaccagcggtggtttgtttgccggatcaagagctaccaactctttttccgaaggtaactggcttcagcagagcgcagataccaaatactgttcttctagtgtagccgtagttaggccaccacttcaagaactctgtagcaccgcctacatacctcgctctgctaatcctgttaccagtggctgctgccagtggcgataagtcgtgtcttaccgggttggactcaagacgatagttaccggataaggcgcagcggtcgggctgaacggggggttcgtgcacacagcccagcttggagcgaacgacctacaccgaactgagatacctacagcgtgagctatgagaaagcgccacgcttcccgaagggagaaaggcggacaggtatccggtaagcggcagggtcggaacaggagagcgcacgagggagcttccagggggaaacgcctggtatctttatagtcctgtcgggtttcgccacctctgacttgagcgtcgatttttgtgatgctcgtcaggggggcggagcctatggaaaaacgccagcaacgcggcctttttacggttcctggccttttgctggccttttgctcacatgttctttcctgcgttatcccctgattctgtggataaccgtattaccgcctttgagtgagctgataccgctcgccgcagccgaacgaccgagcgcagcgagtcagtgagcgaggaagcggaagagcgcccaatacgcaaaccgcctctccccgcgcgttggccgattcattaatgcagctggcacgacaggtttcccgactggaaagcgggcagtgagcgcaacgcaattaatgtgagttagctcactcattaggcaccccaggctttacactttatgcttccggctcgtatgttgtgtggaattgtgagcggataacaatttcacacaggaaacagctatgaccatgattacgccaagcgcgcaattaaccctcactaaagggaacaaaagctggagctgcaagcttaatgtagtcttatgcaatactcttgtagtcttgcaacatggtaacgatgagttagcaacatgccttacaaggagagaaaaagcaccgtgcatgccgattggtggaagtaaggtggtacgatcgtgccttattaggaaggcaacagacgggtctgacatggattggacgaaccactgaattgccgcattgcagagatattgtatttaagtgcctagctcgatacataaacgggtctctctggttagaccagatctgagcctgggagctctctggctaactagggaacccactgcttaagcctcaataaagcttgccttgagtgcttcaagtagtgtgtgcccgtctgttgtgtgactctggtaactagagatccctcagacccttttagtcagtgtggaaaatctctagcagtggcgcccgaacagggacttgaaagcgaaagggaaaccagaggagctctctcgacgcaggactcggcttgctgaagcgcgcacggcaagaggcgaggggcggcgactggtgagtacgccaaaaattttgactagcggaggctagaaggagagagatgggtgcgagagcgtcagtattaagcgggggagaattagatcgcgatgggaaaaaattcggttaaggccagggggaaagaaaaaatataaattaaaacatatagtatgggcaagcagggagctagaacgattcgcagttaatcctggcctgttagaaacatcagaaggctgtagacaaatactgggacagctacaaccatcccttcagacaggatcagaagaacttagatcattatataatacagtagcaaccctctattgtgtgcatcaaaggatagagataaaagacaccaaggaagctttagacaagatagaggaagagcaaaacaaaagtaagaccaccgcacagcaagcggccgctgatcttcagacctggaggaggagatatgagggacaattggagaagtgaattatataaatataaagtagtaaaaattgaaccattaggagtagcacccaccaaggcaaagagaagagtggtgcagagagaaaaaagagcagtgggaataggagctttgttccttgggttcttgggagcagcaggaagcactatgggcgcagcgtcaatgacgctgacggtacaggccagacaattattgtctggtatagtgcagcagcagaacaatttgctgagggctattgaggcgcaacagcatctgttgcaactcacagtctggggcatcaagcagctccaggcaagaatcctggctgtggaaagatacctaaaggatcaacagctcctggggatttggggttgctctggaaaactcatttgcaccactgctgtgccttggaatgctagttggagtaataaatctctggaacagatttggaatcacacgacctggatggagtgggacagagaaattaacaattacacaagcttaatacactccttaattgaagaatcgcaaaaccagcaagaaaagaatgaacaagaattattggaattagataaatgggcaagtttgtggaattggtttaacataacaaattggctgtggtatataaaattattcataatgatagtaggaggcttggtaggtttaagaatagtttttgctgtactttctatagtgaatagagttaggcagggatattcaccattatcgtttcagacccacctcccaaccccgaggggacccttgcgccttttccaaggcagccctgggtttgcgcagggacgcggctgctctgggcgtggttccgggaaacgcagcggcgccgaccctgggtctcgcacattcttcacgtccgttcgcagcgtcacccggatcttcgccgctacccttgtgggccccccggcgacgcttcctgctccgcccctaagtcgggaaggttccttgcggttcgcggcgtgccggacgtgacaaacggaagccgcacgtctcactagtaccctcgcagacggacagcgccagggagcaatggcagcgcgccgaccgcgatgggctgtggccaatagcggctgctcagcagggcgcgccgagagcagcggccgggaaggggcggtgcgggaggcggggtgtggggcggtagtgtgggccctgttcctgcccgcgcggtgttccgcattctgcaagcctccggagcgcacgtcggcagtcggctccctcgttgaccgaatcaccgacctctctccccagggggtacccagctgtctagagaattctagatcttgagacaaatggcagtattcatccacaattttaaaagaaaaggggggattggggggtacagtgcaggggaaagaatagtagacataatagcaacagacatacaaactaaagaattacaaaaacaaattacaaaaattcaaaattttcgggtttattacagggacagcagagatccactttggcgccggctcgaggggg

SEQ ID NO: 113 - DNA, 9014 bp, Artificial Sequence
  Synthetic Polynucleotide
cccggggttattaatagtaatcaattacggggtcattagttcatagcccatatatggagttccgcgttacataacttacggtaaatggcccgcctggctgaccgcccaacgacccccgcccattgacgtcaataatgacgtatgttcccatagtaacgccaatagggactttccattgacgtcaatgggtggagtatttacggtaaactgcccacttggcagtacatcaagtgtatcatatgccaagtacgccccctattgacgtcaatgacggtaaatggcccgcctggcattatgcccagtacatgaccttatgggactttcctacttggcagtacatctacgtattagtcatcgctattaccatggtgatgcggttttggcagtacatcaatgggcgtggatagcggtttgactcacggggatttccaagtctccaccccattgacgtcaatgggagtttgttttggcaccaaaatcaacgggactttccaaaatgtcgtaacaactccgccccattgacgcaaatgggcggtaggcgtgtacggtgggaggtctatataagcagagctctctggctaactgtcgggatcaacaagtttgtacaaaaaagcaggctccgaattcaccggtgccgccaccatggtgagcaagggcgaggaggataacatggccatcatcaaggagttcatgcgcttcaaggtgcacatggagggctccgtgaacggccacgagttcgagatcgagggcgagggcgagggccgcccctacgagggcacccagaccgccaagctgaaggtgaccaagggtggccccctgcccttcgcctgggacatcctgtcccctcagttcatgtacggctccaaggcctacgtgaagcaccccgccgacatccccgactacttgaagctgtccttccccgagggcttcaagtgggagcgcgtgatgaacttcgaggacggcggcgtggtgaccgtgacccaggactcctccctgcaggacggcgagttcatctacaaggtgaagctgcgcggcaccaacttcccctccgacggccccgtaatgcagaagaagaccatgggctgggaggcctcctccgagcggatgtaccccgaggacggcgccctgaagggcgagatcaagcagaggctgaagctgaaggacggcggccactacgacgctgaggtcaagaccacctacaaggccaagaagcccgtgcagctgcccggcgcctacaacgtcaacattaagttggacatcacctcccacaacgaggactacaccatcgtggaacagtacgaacgcgccgagggccgccactccaccggcggcatggacgagctgtacaagtgattaattaagaattcgacccagctttcttgtacaaagtggttggtaagcctatccctaaccctctcctcggtctcgattctacgtagtaatgagctagcagtctcgaggttaacgaattccgccccccccctaacgttactggccgaagccgcttggaataaggccggtgtgcgcttgtctatatgttattttccaccatattgccgtcttttggcaatgtgagggcccggaaacctggccctgtcttcttgacgagcattcctaggggtctttcccctctcgccaaaggaatgcaaggtctgttgaatgtcgtgaaggaagcagttcctctggaagcttcttgaagacaaacaacgtctgtagcgaccctttgcaggcagcggaaccccccacctggcgacaggtgcccctgcggccaaaagccacgtgtataagatacacctgcaaaggcggcacaaccccagtgccacgttgtgagttggatagttgtggaaagagtcaaatggctctcctcaagcgtattcaacaaggggctgaaggatgcccagaaggtaccccattgtatgggatctgatctggggcctcggtgcacatgctttacatgtgtttagtcgaggttaaaaaaacgtctaggccccccgaaccacggggacgtggttttcctttgaaaaacacgataataccatggccatgattaagatcgctacgcggaagtacctggggaaacagaacgtctacgacataggtgtggagcgcgatcacaactttgctctgaaaaatggatttatcgccagcaactgcgagcccgcgtggttcctggccaccgtcggcgtctcgcccgaccaccagggcaagggtctgggcagcgccgtcgtgctccccggagtggaggcggccgagcgcgccggggtgcccgccttcctggagacctccgcgccccgcaacctccccttctacgagcggctcggcttcaccgtcaccgccgacgtcgaggtgcccgaaggaccgcgcacctggtgcatgacccgcaagcccggtgcctgagaattcaccggtggcgcgttaagtcgacaatcaacctctggattacaaaatttgtgaaagattgactggtattcttaactatgttgctccttttacgctatgtggatacgctgctttaatgcctttgtatcatgctattgcttcccgtatggctttcattttctcctccttgtataaatcctggttgctgtctctttatgaggagttgtggcccgttgtcaggcaacgtggcgtggtgtgcactgtgtttgctgacgcaacccccactggttggggcattgccaccacctgtcagctcctttccgggactttcgctttccccctccctattgccacggcggaactcatcgccgcctgccttgcccgctgctggacaggggctcggctgttgggcactgacaattccgtggtgttgtcggggaaatcatcgtcctttccttggctgctcgcctgtgttgccacctggattctgcgcgggacgtccttctgctacgtcccttcggccctcaatccagcggaccttccttcccgcggcctgctgccggctctgcggcctcttccgcgtcttcgccttcgccctcagacgagtcggatctccctttgggccgcctccccgcgtcgactttaagaccaatgacttacaaggcagctgtagatcttagccactttttaaaagaaaaggggggactggaagggctaattcactcccaacgaagacaagatctgctttttgcttgtactgggtctctctggttagaccagatctgagcctgggagctctctggctaactagggaacccactgcttaagcctcaataaagcttgccttgagtgcttcaagtagtgtgtgcccgtctgttgtgtgactctggtaactagagatccctcagacccttttagtcagtgtggaaaatctctagcagtacgtatagtagttcatgtcatcttattattcagtatttataacttgcaaagaaatgaatatcagagagtgagaggaacttgtttattgcagcttataatggttacaaataaagcaatagcatcacaaatttcacaaataaagcatttttttcactgcattctagttgtggtttgtccaaactcatcaatgtatcttatcatgtctggctctagctatcccgcccctaactccgcccatcccgcccctaactccgcccagttccgcccattctccgccccatggctgactaattttttttatttatgcagaggccgaggccgcctcggcctctgagctattccagaagtagtgaggaggcttttttggaggcctagggacgtacccaattcgccctatagtgagtcgtattacgcgcgctcactggccgtcgttttacaacgtcgtgactgggaaaaccctggcgttacccaacttaatcgccttgcagcacatccccctttcgccagctggcgtaatagcgaagaggcccgcaccgatcgcccttcccaacagttgcgcagcctgaatggcgaatgggacgcgccctgtagcggcgcattaagcgcggcgggtgtggtggttacgcgcagcgtgaccgctacacttgccagcgccctagcgcccgctcctttcgctttcttcccttcctttctcgccacgttcgccggctttccccgtcaagctctaaatcgggggctccctttagggttccgatttagtgctttacggcacctcgaccccaaaaaacttgattagggtgatggttcacgtagtgggccatcgccctgatagacggtttttcgccctttgacgttggagtccacgttctttaatagtggactcttgttccaaactggaacaacactcaaccctatctcggtctattcttttgatttataagggattttgccgatttcggcctattggttaaaaaatgagctgatttaacaaaaatttaacgcgaattttaacaaaatattaacgcttacaatttaggtggcacttttcggggaaatgtgcgcggaacccctatttgtttatttttctaaatacattcaaatatgtatccgctcatgagacaataaccctgataaatgcttcaataatattgaaaaaggaagagtatgagtattcaacatttccgtgtcgcccttattcccttttttgcggcattttgccttcctgtttttgctcacccagaaacgctggtgaaagtaaaagatgctgaagatcagttgggtgcacgagtgggttacatcgaactggatctcaacagcggtaagatccttgagagttttcgccccgaagaacgttttccaatgatgagcacttttaaagttctgctatgtggcgcggtattatcccgtattgacgccgggcaagagcaactcggtcgccgcatacactattctcagaatgacttggttgagtactcaccagtcacagaaaagcatcttacggatggcatgacagtaagagaattatgcagtgctgccataaccatgagtgataacactgcggccaacttacttctgacaacgatcggaggaccgaaggagctaaccgcttttttgcacaacatgggggatcatgtaactcgccttgatcgttgggaaccggagctgaatgaagccataccaaacgacgagcgtgacaccacgatgcctgtagcaatggcaacaacgttgcgcaaactattaactggcgaactacttactctagcttcccggcaacaattaatagactggatggaggcggataaagttgcaggaccacttctgcgctcggcccttccggctggctggtttattgctgataaatctggagccggtgagcgtgggtctcgcggtatcattgcagcactggggccagatggtaagccctcccgtatcgtagttatctacacgacggggagtcaggcaactatggatgaacgaaatagacagatcgctgagataggtgcctcactgattaagcattggtaactgtcagaccaagtttactcatatatactttagattgatttaaaacttcatttttaatttaaaaggatctaggtgaagatcctttttgataatctcatgaccaaaatcccttaacgtgagttttcgttccactgagcgtcagaccccgtagaaaagatcaaaggatcttcttgagatcctttttttctgcgcgtaatctgctgcttgcaaacaaaaaaaccaccgctaccagcggtggtttgtttgccggatcaagagctaccaactctttttccgaaggtaactggcttcagcagagcgcagataccaaatactgttcttctagtgtagccgtagttaggccaccacttcaagaactctgtagcaccgcctacatacctcgctctgctaatcctgttaccagtggctgctgccagtggcgataagtcgtgtcttaccgggttggactcaagacgatagttaccggataaggcgcagcggtcgggctgaacggggggttcgtgcacacagcccagcttggagcgaacgacctacaccgaactgagatacctacagcgtgagctatgagaaagcgccacgcttcccgaagggagaaaggcggacaggtatccggtaagcggcagggtcggaacaggagagcgcacgagggagcttccagggggaaacgcctggtatctttatagtcctgtcgggtttcgccacctctgacttgagcgtcgatttttgtgatgctcgtcaggggggcggagcctatggaaaaacgccagcaacgcggcctttttacggttcctggccttttgctggccttttgctcacatgttctttcctgcgttatcccctgattctgtggataaccgtattaccgcctttgagtgagctgataccgctcgccgcagccgaacgaccgagcgcagcgagtcagtgagcgaggaagcggaagagcgcccaatacgcaaaccgcctctccccgcgcgttggccgattcattaatgcagctggcacgacaggtttcccgactggaaagcgggcagtgagcgcaacgcaattaatgtgagttagctcactcattaggcaccccaggctttacactttatgcttccggctcgtatgttgtgtggaattgtgagcggataacaatttcacacaggaaacagctatgaccatgattacgccaagcgcgcaattaaccctcactaaagggaacaaaagctggagctgcaagcttaatgtagtcttatgcaatactcttgtagtcttgcaacatggtaacgatgagttagcaacatgccttacaaggagagaaaaagcaccgtgcatgccgattggtggaagtaaggtggtacgatcgtgccttattaggaaggcaacagacgggtctgacatggattggacgaaccactgaattgccgcattgcagagatattgtatttaagtgcctagctcgatacataaacgggtctctctggttagaccagatctgagcctgggagctctctggctaactagggaacccactgcttaagcctcaataaagcttgccttgagtgcttcaagtagtgtgtgcccgtctgttgtgtgactctggtaactagagatccctcagacccttttagtcagtgtggaaaatctctagcagtggcgcccgaacagggacttgaaagcgaaagggaaaccagaggagctctctcgacgcaggactcggcttgctgaagcgcgcacggcaagaggcgaggggcggcgactggtgagtacgccaaaaattttgactagcggaggctagaaggagagagatgggtgcgagagcgtcagtattaagcgggggagaattagatcgcgatgggaaaaaattcggttaaggccagggggaaagaaaaaatataaattaaaacatatagtatgggcaagcagggagctagaacgattcgcagttaatcctggcctgttagaaacatcagaaggctgtagacaaatactgggacagctacaaccatcccttcagacaggatcagaagaacttagatcattatataatacagtagcaaccctctattgtgtgcatcaaaggatagagataaaagacaccaaggaagctttagacaagatagaggaagagcaaaacaaaagtaagaccaccgcacagcaagcggccgctgatcttcagacctggaggaggagatatgagggacaattggagaagtgaattatataaatataaagtagtaaaaattgaaccattaggagtagcacccaccaaggcaaagagaagagtggtgcagagagaaaaaagagcagtgggaataggagctttgttccttgggttcttgggagcagcaggaagcactatgggcgcagcgtcaatgacgctgacggtacaggccagacaattattgtctggtatagtgcagcagcagaacaatttgctgagggctattgaggcgcaacagcatctgttgcaactcacagtctggggcatcaagcagctccaggcaagaatcctggctgtggaaagatacctaaaggatcaacagctcctggggatttggggttgctctggaaaactcatttgcaccactgctgtgccttggaatgctagttggagtaataaatctctggaacagatttggaatcacacgacctggatggagtgggacagagaaattaacaattacacaagcttaatacactccttaattgaagaatcgcaaaaccagcaagaaaagaatgaacaagaattattggaattagataaatgggcaagtttgtggaattggtttaacataacaaattggctgtggtatataaaattattcataatgatagtaggaggcttggtaggtttaagaatagtttttgctgtactttctatagtgaatagagttaggcagggatattcaccattatcgtttcagacccacctcccaaccccgaggggacccttgcgccttttccaaggcagccctgggtttgcgcagggacgcggctgctctgggcgtggttccgggaaacgcagcggcgccgaccctgggtctcgcacattcttcacgtccgttcgcagcgtcacccggatcttcgccgctacccttgtgggccccccggcgacgcttcctgctccgcccctaagtcgggaaggttccttgcggttcgcggcgtgccggacgtgacaaacggaagccgcacgtctcactagtaccctcgcagacggacagcgccagggagcaatggcagcgcgccgaccgcgatgggctgtggccaatagcggctgctcagcagggcgcgccgagagcagcggccgggaaggggcggtgcgggaggcggggtgtggggcggtagtgtgggccctgttcctgcccgcgcggtgttccgcattctgcaagcctccggagcgcacgtcggcagtcggctccctcgttgaccgaatcaccgacctctctccccagggggtacccagctgtctagagaattctagatcttgagacaaatggcagtattcatccacaattttaaaagaaaaggggggattggggggtacagtgcaggggaaagaatagtagacataatagcaacagacatacaaactaaagaattacaaaaacaaattacaaaaattcaaaattttcgggtttattacagggacagcagagatccactttggcgccggctcgaggggg

SEQ ID NO: 114 - DNA, 10451 bp, Artificial Sequence
  Synthetic Polynucleotide
cccggggttattaatagtaatcaattacggggtcattagttcatagcccatatatggagttccgcgttacataacttacggtaaatggcccgcctggctgaccgcccaacgacccccgcccattgacgtcaataatgacgtatgttcccatagtaacgccaatagggactttccattgacgtcaatgggtggagtatttacggtaaactgcccacttggcagtacatcaagtgtatcatatgccaagtacgccccctattgacgtcaatgacggtaaatggcccgcctggcattatgcccagtacatgaccttatgggactttcctacttggcagtacatctacgtattagtcatcgctattaccatggtgatgcggttttggcagtacatcaatgggcgtggatagcggtttgactcacggggatttccaagtctccaccccattgacgtcaatgggagtttgttttggcaccaaaatcaacgggactttccaaaatgtcgtaacaactccgccccattgacgcaaatgggcggtaggcgtgtacggtgggaggtctatataagcagagctctctggctaactgtcgggatcaacaagtttgtacaaaaaagctgaacgagaaacgtaaaatgatataaatatcaatatattaaattagattttgcataaaaaacagactacataatactgtaaaacacaacatatccagtcactatggcggccgcattaggcaccccaggctttacactttatgcttccggctcgtataatgtgtggattttgagttaggatccgtcgagattttcaggagctaaggaagctaaaatggagaaaaaaatcactggatataccaccgttgatatatcccaatggcatcgtaaagaacattttgaggcatttcagtcagttgctcaatgtacctataaccagaccgttcagctggatattacggcctttttaaagaccgtaaagaaaaataagcacaagttttatccggcctttattcacattcttgcccgcctgatgaatgctcatccggaattccgtatggcaatgaaagacggtgagctggtgatatgggatagtgttcacccttgttacaccgttttccatgagcaaactgaaacgttttcatcgctctggagtgaataccacgacgatttccggcagtttctacacatatattcgcaagatgtggcgtgttacggtgaaaacctggcctatttccctaaagggtttattgagaatatgtttttcgtctcagccaatccctgggtgagtttcaccagttttgatttaaacgtggccaatatggacaacttcttcgcccccgttttcaccatgggcaaatattatacgcaaggcgacaaggtgctgatgccgctggcgattcaggttcatcatgccgtttgtgatggcttccatgtcggcagaatgcttaatgaattacaacagtactgcgatgagtggcagggcggggcgtaaagatctggatccggcttactaaaagccagataacagtatgcgtatttgcgcgctgatttttgcggtataagaatatatactgatatgtatacccgaagtatgtcaaaaagaggtatgctatgaagcagcgtattacagtgacagttgacagcgacagctatcagttgctcaaggcatatatgatgtcaatatctccggtctggtaagcacaaccatgcagaatgaagcccgtcgtctgcgtgccgaacgctggaaagcggaaaatcaggaagggatggctgaggtcgcccggtttattgaaatgaacggctcttttgctgacgagaacaggggctggtgaaatgcagtttaaggtttacacctataaaagagagagccgttatcgtctgtttgtggatgtacagagtgatattattgacacgcccgggcgacggatggtgatccccctggccagtgcacgtctgctgtcagataaagtctcccgtgaactttacccggtggtgcatatcggggatgaaagctggcgcatgatgaccaccgatatggccagtgtgccggtctccgttatcggggaagaagtggctgatctcagccaccgcgaaaatgacatcaaaaacgccattaacctgatgttctggggaatataaatgtcaggctcccttatacacagccagtctgcaggtcgaccatagtgactggatatgttgtgttttacagtattatgtagtctgttttttatgcaaaatctaatttaatatattgatatttatatcattttacgtttctcgttcagctttcttgtacaaagtggttggtaagcctatccctaaccctctcctcggtctcgattctacgtagtaatgagctagcagtctcgaggttaacgaattccgccccccccctaacgttactggccgaagccgcttggaataaggccggtgtgcgcttgtctatatgttattttccaccatattgccgtcttttggcaatgtgagggcccggaaacctggccctgtcttcttgacgagcattcctaggggtctttcccctctcgccaaaggaatgcaaggtctgttgaatgtcgtgaaggaagcagttcctctggaagcttcttgaagacaaacaacgtctgtagcgaccctttgcaggcagcggaaccccccacctggcgacaggtgcccctgcggccaaaagccacgtgtataagatacacctgcaaaggcggcacaaccccagtgccacgttgtgagttggatagttgtggaaagagtcaaatggctctcctcaagcgtattcaacaaggggctgaaggatgcccagaaggtaccccattgtatgggatctgatctggggcctcggtgcacatgctttacatgtgtttagtcgaggttaaaaaaacgtctaggccccccgaaccacggggacgtggttttcctttgaaaaacacgataataccatgggatcggccattgaacaagatggattgcacgcaggttctccggccgcttgggtggagaggctattcggctatgactgggcacaacagacaatcggctgctctgatgccgccgtgttccggctgtcagcgcaggggcgcccggttctttttgtcaagaccgacctgtccggtgccctgaatgaactgcaggacgaggcagcgcggctatcgtggctggccacgacgggcgttccttgcgcagctgtgctcgacgttgtcactgaagcgggaagggactggctgctattgggcgaagtgccggggcaggatctcctgtcatctcaccttgctcctgccgagaaagtatccatcatggctgatgcaatgcggcggctgcatacgcttgatccggctacctgcccattcgaccaccaagcgaaacatcgcatcgagcgagcacgtactcggatggaagccggtcttgtcgatcaggatgatctggacgaagagcatcaggggctcgcgccagccgaactgttcgccaggctcaaggcgcgcatgcccgacggcgatgatctcgtcgtgacccatggcgatgcctgcctttcatacgagaccgagatcctgactgtcgagtacggattgcttcctatcggcaaaatcgtggagaagaggattgaatgtaccgtctattcagtcgataataatgggaacatctacacacagcccgtggctcaatggcacgacagaggagagcaggaagtttttgaatactgtctcgaggacggatccctcatccgcgctactaaagatcataagtttatgaccgtggacggccagatgctgccaattgacgaaatttttgaacgagagctggatctgatgagagtcgacaaccttccaaactgagaattcaccggtggcgcgttaagtcgacaatcaacctctggattacaaaatttgtgaaagattgactggtattcttaactatgttgctccttttacgctatgtggatacgctgctttaatgcctttgtatcatgctattgcttcccgtatggctttcattttctcctccttgtataaatcctggttgctgtctctttatgaggagttgtggcccgttgtcaggcaacgtggcgtggtgtgcactgtgtttgctgacgcaacccccactggttggggcattgccaccacctgtcagctcctttccgggactttcgctttccccctccctattgccacggcggaactcatcgccgcctgccttgcccgctgctggacaggggctcggctgttgggcactgacaattccgtggtgttgtcggggaaatcatcgtcctttccttggctgctcgcctgtgttgccacctggattctgcgcgggacgtccttctgctacgtcccttcggccctcaatccagcggaccttccttcccgcggcctgctgccggctctgcggcctcttccgcgtcttcgccttcgccctcagacgagtcggatctccctttgggccgcctccccgcgtcgactttaagaccaatgacttacaaggcagctgtagatcttagccactttttaaaagaaaaggggggactggaagggctaattcactcccaacgaagacaagatctgctttttgcttgtactgggtctctctggttagaccagatctgagcctgggagctctctggctaactagggaacccactgcttaagcctcaataaagcttgccttgagtgcttcaagtagtgtgtgcccgtctgttgtgtgactctggtaactagagatccctcagacccttttagtcagtgtggaaaatctctagcagtacgtatagtagttcatgtcatcttattattcagtatttataacttgcaaagaaatgaatatcagagagtgagaggaacttgtttattgcagcttataatggttacaaataaagcaatagcatcacaaatttcacaaataaagcatttttttcactgcattctagttgtggtttgtccaaactcatcaatgtatcttatcatgtctggctctagctatcccgcccctaactccgcccatcccgcccctaactccgcccagttccgcccattctccgccccatggctgactaattttttttatttatgcagaggccgaggccgcctcggcctctgagctattccagaagtagtgaggaggcttttttggaggcctagggacgtacccaattcgccctatagtgagtcgtattacgcgcgctcactggccgtcgttttacaacgtcgtgactgggaaaaccctggcgttacccaacttaatcgccttgcagcacatccccctttcgccagctggcgtaatagcgaagaggcccgcaccgatcgcccttcccaacagttgcgcagcctgaatggcgaatgggacgcgccctgtagcggcgcattaagcgcggcgggtgtggtggttacgcgcagcgtgaccgctacacttgccagcgccctagcgcccgctcctttcgctttcttcccttcctttctcgccacgttcgccggctttccccgtcaagctctaaatcgggggctccctttagggttccgatttagtgctttacggcacctcgaccccaaaaaacttgattagggtgatggttcacgtagtgggccatcgccctgatagacggtttttcgccctttgacgttggagtccacgttctttaatagtggactcttgttccaaactggaacaacactcaaccctatctcggtctattcttttgatttataagggattttgccgatttcggcctattggttaaaaaatgagctgatttaacaaaaatttaacgcgaattttaacaaaatattaacgcttacaatttaggtggcacttttcggggaaatgtgcgcggaacccctatttgtttatttttctaaatacattcaaatatgtatccgctcatgagacaataaccctgataaatgcttcaataatattgaaaaaggaagagtatgagtattcaacatttccgtgtcgcccttattcccttttttgcggcattttgccttcctgtttttgctcacccagaaacgctggtgaaagtaaaagatgctgaagatcagttgggtgcacgagtgggttacatcgaactggatctcaacagcggtaagatccttgagagttttcgccccgaagaacgttttccaatgatgagcacttttaaagttctgctatgtggcgcggtattatcccgtattgacgccgggcaagagcaactcggtcgccgcatacactattctcagaatgacttggttgagtactcaccagtcacagaaaagcatcttacggatggcatgacagtaagagaattatgcagtgctgccataaccatgagtgataacactgcggccaacttacttctgacaacgatcggaggaccgaaggagctaaccgcttttttgcacaacatgggggatcatgtaactcgccttgatcgttgggaaccggagctgaatgaagccataccaaacgacgagcgtgacaccacgatgcctgtagcaatggcaacaacgttgcgcaaactattaactggcgaactacttactctagcttcccggcaacaattaatagactggatggaggcggataaagttgcaggaccacttctgcgctcggcccttccggctggctggtttattgctgataaatctggagccggtgagcgtgggtctcgcggtatcattgcagcactggggccagatggtaagccctcccgtatcgtagttatctacacgacggggagtcaggcaactatggatgaacgaaatagacagatcgctgagataggtgcctcactgattaagcattggtaactgtcagaccaagtttactcatatatactttagattgatttaaaacttcatttttaatttaaaaggatctaggtgaagatcctttttgataatctcatgaccaaaatcccttaacgtgagttttcgttccactgagcgtcagaccccgtagaaaagatcaaaggatcttcttgagatcctttttttctgcgcgtaatctgctgcttgcaaacaaaaaaaccaccgctaccagcggtggtttgtttgccggatcaagagctaccaactctttttccgaaggtaactggcttcagcagagcgcagataccaaatactgttcttctagtgtagccgtagttaggccaccacttcaagaactctgtagcaccgcctacatacctcgctctgctaatcctgttaccagtggctgctgccagtggcgataagtcgtgtcttaccgggttggactcaagacgatagttaccggataaggcgcagcggtcgggctgaacggggggttcgtgcacacagcccagcttggagcgaacgacctacaccgaactgagatacctacagcgtgagctatgagaaagcgccacgcttcccgaagggagaaaggcggacaggtatccggtaagcggcagggtcggaacaggagagcgcacgagggagcttccagggggaaacgcctggtatctttatagtcctgtcgggtttcgccacctctgacttgagcgtcgatttttgtgatgctcgtcaggggggcggagcctatggaaaaacgccagcaacgcggcctttttacggttcctggccttttgctggccttttgctcacatgttctttcctgcgttatcccctgattctgtggataaccgtattaccgcctttgagtgagctgataccgctcgccgcagccgaacgaccgagcgcagcgagtcagtgagcgaggaagcggaagagcgcccaatacgcaaaccgcctctccccgcgcgttggccgattcattaatgcagctggcacgacaggtttcccgactggaaagcgggcagtgagcgcaacgcaattaatgtgagttagctcactcattaggcaccccaggctttacactttatgcttccggctcgtatgttgtgtggaattgtgagcggataacaatttcacacaggaaacagctatgaccatgattacgccaagcgcgcaattaaccctcactaaagggaacaaaagctggagctgcaagcttaatgtagtcttatgcaatactcttgtagtcttgcaacatggtaacgatgagttagcaacatgccttacaaggagagaaaaagcaccgtgcatgccgattggtggaagtaaggtggtacgatcgtgccttattaggaaggcaacagacgggtctgacatggattggacgaaccactgaattgccgcattgcagagatattgtatttaagtgcctagctcgatacataaacgggtctctctggttagaccagatctgagcctgggagctctctggctaactagggaacccactgcttaagcctcaataaagcttgccttgagtgcttcaagtagtgtgtgcccgtctgttgtgtgactctggtaactagagatccctcagacccttttagtcagtgtggaaaatctctagcagtggcgcccgaacagggacttgaaagcgaaagggaaaccagaggagctctctcgacgcaggactcggcttgctgaagcgcgcacggcaagaggcgaggggcggcgactggtgagtacgccaaaaattttgactagcggaggctagaaggagagagatgggtgcgagagcgtcagtattaagcgggggagaattagatcgcgatgggaaaaaattcggttaaggccagggggaaagaaaaaatataaattaaaacatatagtatgggcaagcagggagctagaacgattcgcagttaatcctggcctgttagaaacatcagaaggctgtagacaaatactgggacagctacaaccatcccttcagacaggatcagaagaacttagatcattatataatacagtagcaaccctctattgtgtgcatcaaaggatagagataaaagacaccaaggaagctttagacaagatagaggaagagcaaaacaaaagtaagaccaccgcacagcaagcggccgctgatcttcagacctggaggaggagatatgagggacaattggagaagtgaattatataaatataaagtagtaaaaattgaaccattaggagtagcacccaccaaggcaaagagaagagtggtgcagagagaaaaaagagcagtgggaataggagctttgttccttgggttcttgggagcagcaggaagcactatgggcgcagcgtcaatgacgctgacggtacaggccagacaattattgtctggtatagtgcagcagcagaacaatttgctgagggctattgaggcgcaacagcatctgttgcaactcacagtctggggcatcaagcagctccaggcaagaatcctggctgtggaaagatacctaaaggatcaacagctcctggggatttggggttgctctggaaaactcatttgcaccactgctgtgccttggaatgctagttggagtaataaatctctggaacagatttggaatcacacgacctggatggagtgggacagagaaattaacaattacacaagcttaatacactccttaattgaagaatcgcaaaaccagcaagaaaagaatgaacaagaattattggaattagataaatgggcaagtttgtggaattggtttaacataacaaattggctgtggtatataaaattattcataatgatagtaggaggcttggtaggtttaagaatagtttttgctgtactttctatagtgaatagagttaggcagggatattcaccattatcgtttcagacccacctcccaaccccgaggggacccttgcgccttttccaaggcagccctgggtttgcgcagggacgcggctgctctgggcgtggttccgggaaacgcagcggcgccgaccctgggtctcgcacattcttcacgtccgttcgcagcgtcacccggatcttcgccgctacccttgtgggccccccggcgacgcttcctgctccgcccctaagtcgggaaggttccttgcggttcgcggcgtgccggacgtgacaaacggaagccgcacgtctcactagtaccctcgcagacggacagcgccagggagcaatggcagcgcgccgaccgcgatgggctgtggccaatagcggctgctcagcagggcgcgccgagagcagcggccgggaaggggcggtgcgggaggcggggtgtggggcggtagtgtgggccctgttcctgcccgcgcggtgttccgcattctgcaagcctccggagcgcacgtcggcagtcggctccctcgttgaccgaatcaccgacctctctccccagggggtacccagctgtctagagaattctagatcttgagacaaatggcagtattcatccacaattttaaaagaaaaggggggattggggggtacagtgcaggggaaagaatagtagacataatagcaacagacatacaaactaaagaattacaaaaacaaattacaaaaattcaaaattttcgggtttattacagggacagcagagatccactttggcgccggctcgaggggg

SEQ ID NO: 115 - protein, 296 aa, Artificial Sequence; identical to SEQ ID NO: 57
  Synthetic Polypeptide

SEQ ID NO: 116 - DNA, 9896 bp, Artificial Sequence
  Synthetic Polynucleotide
cccggggttattaatagtaatcaattacggggtcattagttcatagcccatatatggagttccgcgttacataacttacggtaaatggcccgcctggctgaccgcccaacgacccccgcccattgacgtcaataatgacgtatgttcccatagtaacgccaatagggactttccattgacgtcaatgggtggagtatttacggtaaactgcccacttggcagtacatcaagtgtatcatatgccaagtacgccccctattgacgtcaatgacggtaaatggcccgcctggcattatgcccagtacatgaccttatgggactttcctacttggcagtacatctacgtattagtcatcgctattaccatggtgatgcggttttggcagtacatcaatgggcgtggatagcggtttgactcacggggatttccaagtctccaccccattgacgtcaatgggagtttgttttggcaccaaaatcaacgggactttccaaaatgtcgtaacaactccgccccattgacgcaaatgggcggtaggcgtgtacggtgggaggtctatataagcagagctctctggctaactgtcgggatcaacaagtttgtacaaaaaagctgaacgagaaacgtaaaatgatataaatatcaatatattaaattagattttgcataaaaaacagactacataatactgtaaaacacaacatatccagtcactatggcggccgcattaggcaccccaggctttacactttatgcttccggctcgtataatgtgtggattttgagttaggatccgtcgagattttcaggagctaaggaagctaaaatggagaaaaaaatcactggatataccaccgttgatatatcccaatggcatcgtaaagaacattttgaggcatttcagtcagttgctcaatgtacctataaccagaccgttcagctggatattacggcctttttaaagaccgtaaagaaaaataagcacaagttttatccggcctttattcacattcttgcccgcctgatgaatgctcatccggaattccgtatggcaatgaaagacggtgagctggtgatatgggatagtgttcacccttgttacaccgttttccatgagcaaactgaaacgttttcatcgctctggagtgaataccacgacgatttccggcagtttctacacatatattcgcaagatgtggcgtgttacggtgaaaacctggcctatttccctaaagggtttattgagaatatgtttttcgtctcagccaatccctgggtgagtttcaccagttttgatttaaacgtggccaatatggacaacttcttcgcccccgttttcaccatgggcaaatattatacgcaaggcgacaaggtgctgatgccgctggcgattcaggttcatcatgccgtttgtgatggcttccatgtcggcagaatgcttaatgaattacaacagtactgcgatgagtggcagggcggggcgtaaagatctggatccggcttactaaaagccagataacagtatgcgtatttgcgcgctgatttttgcggtataagaatatatactgatatgtatacccgaagtatgtcaaaaagaggtatgctatgaagcagcgtattacagtgacagttgacagcgacagctatcagttgctcaaggcatatatgatgtcaatatctccggtctggtaagcacaaccatgcagaatgaagcccgtcgtctgcgtgccgaacgctggaaagcggaaaatcaggaagggatggctgaggtcgcccggtttattgaaatgaacggctcttttgctgacgagaacaggggctggtgaaatgcagtttaaggtttacacctataaaagagagagccgttatcgtctgtttgtggatgtacagagtgatattattgacacgcccgggcgacggatggtgatccccctggccagtgcacgtctgctgtcagataaagtctcccgtgaactttacccggtggtgcatatcggggatgaaagctggcgcatgatgaccaccgatatggccagtgtgccggtctccgttatcggggaagaagtggctgatctcagccaccgcgaaaatgacatcaaaaacgccattaacctgatgttctggggaatataaatgtcaggctcccttatacacagccagtctgcaggtcgaccatagtgactggatatgttgtgttttacagtattatgtagtctgttttttatgcaaaatctaatttaatatattgatatttatatcattttacgtttctcgttcagctttcttgtacaaagtggttggtaagcctatccctaaccctctcctcggtctcgattctacgtagtaatgagctagcagtctcgaggttaacgaattccgccccccccctaacgttactggccgaagccgcttggaataaggccggtgtgcgcttgtctatatgttattttccaccatattgccgtcttttggcaatgtgagggcccggaaacctggccctgtcttcttgacgagcattcctaggggtctttcccctctcgccaaaggaatgcaaggtctgttgaatgtcgtgaaggaagcagttcctctggaagcttcttgaagacaaacaacgtctgtagcgaccctttgcaggcagcggaaccccccacctggcgacaggtgcccctgcggccaaaagccacgtgtataagatacacctgcaaaggcggcacaaccccagtgccacgttgtgagttggatagttgtggaaagagtcaaatggctctcctcaagcgtattcaacaaggggctgaaggatgcccagaaggtaccccattgtatgggatctgatctggggcctcggtgcacatgctttacatgtgtttagtcgaggttaaaaaaacgtctaggccccccgaaccacggggacgtggttttcctttgaaaaacacgataataccatggccatgattaagatcgctacgcggaagtacctggggaaacagaacgtctacgacataggtgtggagcgcgatcacaactttgctctgaaaaatggatttatcgccagcaactgcttgccgaatatcatggtggaaaatggccgcttttctggattcatcgactgtggccggctgggtgtggcggaccgctatcaggacatagcgttggctacccgtgatattgctgaagagcttggcggcgaatgggctgaccgcttcctcgtgctttacggtatcgccgctcccgattcgcagcgcatcgccttctatcgccttcttgacgagttcttctgagaattcaccggtggcgcgttaagtcgacaatcaacctctggattacaaaatttgtgaaagattgactggtattcttaactatgttgctccttttacgctatgtggatacgctgctttaatgcctttgtatcatgctattgcttcccgtatggctttcattttctcctccttgtataaatcctggttgctgtctctttatgaggagttgtggcccgttgtcaggcaacgtggcgtggtgtgcactgtgtttgctgacgcaacccccactggttggggcattgccaccacctgtcagctcctttccgggactttcgctttccccctccctattgccacggcggaactcatcgccgcctgccttgcccgctgctggacaggggctcggctgttgggcactgacaattccgtggtgttgtcggggaaatcatcgtcctttccttggctgctcgcctgtgttgccacctggattctgcgcgggacgtccttctgctacgtcccttcggccctcaatccagcggaccttccttcccgcggcctgctgccggctctgcggcctcttccgcgtcttcgccttcgccctcagacgagtcggatctccctttgggccgcctccccgcgtcgactttaagaccaatgacttacaaggcagctgtagatcttagccactttttaaaagaaaaggggggactggaagggctaattcactcccaacgaagacaagatctgctttttgcttgtactgggtctctctggttagaccagatctgagcctgggagctctctggctaactagggaacccactgcttaagcctcaataaagcttgccttgagtgcttcaagtagtgtgtgcccgtctgttgtgtgactctggtaactagagatccctcagacccttttagtcagtgtggaaaatctctagcagtacgtatagtagttcatgtcatcttattattcagtatttataacttgcaaagaaatgaatatcagagagtgagaggaacttgtttattgcagcttataatggttacaaataaagcaatagcatcacaaatttcacaaataaagcatttttttcactgcattctagttgtggtttgtccaaactcatcaatgtatcttatcatgtctggctctagctatcccgcccctaactccgcccatcccgcccctaactccgcccagttccgcccattctccgccccatggctgactaattttttttatttatgcagaggccgaggccgcctcggcctctgagctattccagaagtagtgaggaggcttttttggaggcctagggacgtacccaattcgccctatagtgagtcgtattacgcgcgctcactggccgtcgttttacaacgtcgtgactgggaaaaccctggcgttacccaacttaatcgccttgcagcacatccccctttcgccagctggcgtaatagcgaagaggcccgcaccgatcgcccttcccaacagttgcgcagcctgaatggcgaatgggacgcgccctgtagcggcgcattaagcgcggcgggtgtggtggttacgcgcagcgtgaccgctacacttgccagcgccctagcgcccgctcctttcgctttcttcccttcctttctcgccacgttcgccggctttccccgtcaagctctaaatcgggggctccctttagggttccgatttagtgctttacggcacctcgaccccaaaaaacttgattagggtgatggttcacgtagtgggccatcgccctgatagacggtttttcgccctttgacgttggagtccacgttctttaatagtggactcttgttccaaactggaacaacactcaaccctatctcggtctattcttttgatttataagggattttgccgatttcggcctattggttaaaaaatgagctgatttaacaaaaatttaacgcgaattttaacaaaatattaacgcttacaatttaggtggcacttttcggggaaatgtgcgcggaacccctatttgtttatttttctaaatacattcaaatatgtatccgctcatgagacaataaccctgataaatgcttcaataatattgaaaaaggaagagtatgagtattcaacatttccgtgtcgcccttattcccttttttgcggcattttgccttcctgtttttgctcacccagaaacgctggtgaaagtaaaagatgctgaagatcagttgggtgcacgagtgggttacatcgaactggatctcaacagcggtaagatccttgagagttttcgccccgaagaacgttttccaatgatgagcacttttaaagttctgctatgtggcgcggtattatcccgtattgacgccgggcaagagcaactcggtcgccgcatacactattctcagaatgacttggttgagtactcaccagtcacagaaaagcatcttacggatggcatgacagtaagagaattatgcagtgctgccataaccatgagtgataacactgcggccaacttacttctgacaacgatcggaggaccgaaggagctaaccgcttttttgcacaacatgggggatcatgtaactcgccttgatcgttgggaaccggagctgaatgaagccataccaaacgacgagcgtgacaccacgatgcctgtagcaatggcaacaacgttgcgcaaactattaactggcgaactacttactctagcttcccggcaacaattaatagactggatggaggcggataaagttgcaggaccacttctgcgctcggcccttccggctggctggtttattgctgataaatctggagccggtgagcgtgggtctcgcggtatcattgcagcactggggccagatggtaagccctcccgtatcgtagttatctacacgacggggagtcaggcaactatggatgaacgaaatagacagatcgctgagataggtgcctcactgattaagcattggtaactgtcagaccaagtttactcatatatactttagattgatttaaaacttcatttttaatttaaaaggatctaggtgaagatcctttttgataatctcatgaccaaaatcccttaacgtgagttttcgttccactgagcgtcagaccccgtagaaaagatcaaaggatcttcttgagatcctttttttctgcgcgtaatctgctgcttgcaaacaaaaaaaccaccgctaccagcggtggtttgtttgccggatcaagagctaccaactctttttccgaaggtaactggcttcagcagagcgcagataccaaatactgttcttctagtgtagccgtagttaggccaccacttcaagaactctgtagcaccgcctacatacctcgctctgctaatcctgttaccagtggctgctgccagtggcgataagtcgtgtcttaccgggttggactcaagacgatagttaccggataaggcgcagcggtcgggctgaacggggggttcgtgcacacagcccagcttggagcgaacgacctacaccgaactgagatacctacagcgtgagctatgagaaagcgccacgcttcccgaagggagaaaggcggacaggtatccggtaagcggcagggtcggaacaggagagcgcacgagggagcttccagggggaaacgcctggtatctttatagtcctgtcgggtttcgccacctctgacttgagcgtcgatttttgtgatgctcgtcaggggggcggagcctatggaaaaacgccagcaacgcggcctttttacggttcctggccttttgctggccttttgctcacatgttctttcctgcgttatcccctgattctgtggataaccgtattaccgcctttgagtgagctgataccgctcgccgcagccgaacgaccgagcgcagcgagtcagtgagcgaggaagcggaagagcgcccaatacgcaaaccgcctctccccgcgcgttggccgattcattaatgcagctggcacgacaggtttcccgactggaaagcgggcagtgagcgcaacgcaattaatgtgagttagctcactcattaggcaccccaggctttacactttatgcttccggctcgtatgttgtgtggaattgtgagcggataacaatttcacacaggaaacagctatgaccatgattacgccaagcgcgcaattaaccctcactaaagggaacaaaagctggagctgcaagcttaatgtagtcttatgcaatactcttgtagtcttgcaacatggtaacgatgagttagcaacatgccttacaaggagagaaaaagcaccgtgcatgccgattggtggaagtaaggtggtacgatcgtgccttattaggaaggcaacagacgggtctgacatggattggacgaaccactgaattgccgcattgcagagatattgtatttaagtgcctagctcgatacataaacgggtctctctggttagaccagatctgagcctgggagctctctggctaactagggaacccactgcttaagcctcaataaagcttgccttgagtgcttcaagtagtgtgtgcccgtctgttgtgtgactctggtaactagagatccctcagacccttttagtcagtgtggaaaatctctagcagtggcgcccgaacagggacttgaaagcgaaagggaaaccagaggagctctctcgacgcaggactcggcttgctgaagcgcgcacggcaagaggcgaggggcggcgactggtgagtacgccaaaaattttgactagcggaggctagaaggagagagatgggtgcgagagcgtcagtattaagcgggggagaattagatcgcgatgggaaaaaattcggttaaggccagggggaaagaaaaaatataaattaaaacatatagtatgggcaagcagggagctagaacgattcgcagttaatcctggcctgttagaaacatcagaaggctgtagacaaatactgggacagctacaaccatcccttcagacaggatcagaagaacttagatcattatataatacagtagcaaccctctattgtgtgcatcaaaggatagagataaaagacaccaaggaagctttagacaagatagaggaagagcaaaacaaaagtaagaccaccgcacagcaagcggccgctgatcttcagacctggaggaggagatatgagggacaattggagaagtgaattatataaatataaagtagtaaaaattgaaccattaggagtagcacccaccaaggcaaagagaagagtggtgcagagagaaaaaagagcagtgggaataggagctttgttccttgggttcttgggagcagcaggaagcactatgggcgcagcgtcaatgacgctgacggtacaggccagacaattattgtctggtatagtgcagcagcagaacaatttgctgagggctattgaggcgcaacagcatctgttgcaactcacagtctggggcatcaagcagctccaggcaagaatcctggctgtggaaagatacctaaaggatcaacagctcctggggatttggggttgctctggaaaactcatttgcaccactgctgtgccttggaatgctagttggagtaataaatctctggaacagatttggaatcacacgacctggatggagtgggacagagaaattaacaattacacaagcttaatacactccttaattgaagaatcgcaaaaccagcaagaaaagaatgaacaagaattattggaattagataaatgggcaagtttgtggaattggtttaacataacaaattggctgtggtatataaaattattcataatgatagtaggaggcttggtaggtttaagaatagtttttgctgtactttctatagtgaatagagttaggcagggatattcaccattatcgtttcagacccacctcccaaccccgaggggacccttgcgccttttccaaggcagccctgggtttgcgcagggacgcggctgctctgggcgtggttccgggaaacgcagcggcgccgaccctgggtctcgcacattcttcacgtccgttcgcagcgtcacccggatcttcgccgctacccttgtgggccccccggcgacgcttcctgctccgcccctaagtcgggaaggttccttgcggttcgcggcgtgccggacgtgacaaacggaagccgcacgtctcactagtaccctcgcagacggacagcgccagggagcaatggcagcgcgccgaccgcgatgggctgtggccaatagcggctgctcagcagggcgcgccgagagcagcggccgggaaggggcggtgcgggaggcggggtgtggggcggtagtgtgggccctgttcctgcccgcgcggtgttccgcattctgcaagcctccggagcgcacgtcggcagtcggctccctcgttgaccgaatcaccgacctctctccccagggggtacccagctgtctagagaattctagatcttgagacaaatggcagtattcatccacaattttaaaagaaaaggggggattggggggtacagtgcaggggaaagaatagtagacataatagcaacagacatacaaactaaagaattacaaaaacaaattacaaaaattcaaaattttcgggtttattacagggacagcagagatccactttggcgccggctcgaggggg

SEQ ID NO: 117 - protein, 111 aa, Artificial Sequence
  Synthetic Polypeptide
MAMIKIATRKYLGKQNVYDIGVERDHNFALKNGFIASNCLPNIMVENGRFSGFIDCGRLGVADRYQDIALATRDIAEELGGEWADRFLVLYGIAAPDSQRIAFYRLLDEFF

SEQ ID NO: 118 - DNA, 9536 bp, Artificial Sequence
  Synthetic Polynucleotide
cccggggttattaatagtaatcaattacggggtcattagttcatagcccatatatggagttccgcgttacataacttacggtaaatggcccgcctggctgaccgcccaacgacccccgcccattgacgtcaataatgacgtatgttcccatagtaacgccaatagggactttccattgacgtcaatgggtggagtatttacggtaaactgcccacttggcagtacatcaagtgtatcatatgccaagtacgccccctattgacgtcaatgacggtaaatggcccgcctggcattatgcccagtacatgaccttatgggactttcctacttggcagtacatctacgtattagtcatcgctattaccatggtgatgcggttttggcagtacatcaatgggcgtggatagcggtttgactcacggggatttccaagtctccaccccattgacgtcaatgggagtttgttttggcaccaaaatcaacgggactttccaaaatgtcgtaacaactccgccccattgacgcaaatgggcggtaggcgtgtacggtgggaggtctatataagcagagctctctggctaactgtcgggatcaacaagtttgtacaaaaaagcaggctccgaattcaccggtgccgccaccatgagcgagctgattaaggagaacatgcacatgaagctgtacatggagggcaccgtggacaaccatcacttcaagtgcacatccgagggcgaaggcaagccctacgagggcacccagaccatgagaatcaaggtggtcgagggcggccctctccccttcgccttcgacatcctggctactagcttcctctacggcagcaagaccttcatcaaccacacccagggcatccccgacttcttcaagcagtccttccctgagggcttcacatgggagagagtcaccacatacgaagacgggggcgtgctgaccgctacccaggacaccagcctccaggacggctgcctcatctacaacgtcaagatcagaggggtgaacttcacatccaacggccctgtgatgcagaagaaaacactcggctgggaggccttcaccgagacgctgtaccccgctgacggcggcctggaaggcagaaacgacatggccctgaagctcgtgggcgggagccatctgatcgcaaacatcaagaccacatatagatccaagaaacccgctaagaacctcaagatgcctggcgtctactatgtggactacagactggaaagaatcaaggaggccaacaacgagacctacgtcgagcagcacgaggtggcagtggccagatactgcgacctccctagcaaactggggcacaagcttaattaattaattaagaattcgacccagctttcttgtacaaagtggttggtaagcctatccctaaccctctcctcggtctcgattctacgtagtaatgagctagcagtctcgaggttaacgaattccgccccccccctaacgttactggccgaagccgcttggaataaggccggtgtgcgcttgtctatatgttattttccaccatattgccgtcttttggcaatgtgagggcccggaaacctggccctgtcttcttgacgagcattcctaggggtctttcccctctcgccaaaggaatgcaaggtctgttgaatgtcgtgaaggaagcagttcctctggaagcttcttgaagacaaacaacgtctgtagcgaccctttgcaggcagcggaaccccccacctggcgacaggtgcccctgcggccaaaagccacgtgtataagatacacctgcaaaggcggcacaaccccagtgccacgttgtgagttggatagttgtggaaagagtcaaatggctctcctcaagcgtattcaacaaggggctgaaggatgcccagaaggtaccccattgtatgggatctgatctggggcctcggtgcacatgctttacatgtgtttagtcgaggttaaaaaaacgtctaggccccccgaaccacggggacgtggttttcctttgaaaaacacgataataccatgggatcggccattgaacaagatggattgcacgcaggttctccggccgcttgggtggagaggctattcggctatgactgggcacaacagacaatcggctgctctgatgccgccgtgttccggctgtcagcgcaggggcgcccggttctttttgtcaagaccgacctgtccggtgccctgaatgaactgcaggacgaggcagcgcggctatcgtggctggccacgacgggcgttccttgcgcagctgtgctcgacgttgtcactgaagcgggaagggactggctgctattgggcgaagtgccggggcaggatctcctgtcatctcaccttgctcctgccgagaaagtatccatcatggctgatgcaatgcggcggctgcatacgcttgatccggctacctgcccattcgaccaccaagcgaaacatcgcatcgagcgagcacgtactcggatggaagccggtcttgtcgatcaggatgatctggacgaagagcatcaggggctcgcgccagccgaactgttcgccaggctcaaggcgcgcatgcccgacggcgatgatctcgtcgtgacccatggcgatgcctgcctttcatacgagaccgagatcctgactgtcgagtacggattgcttcctatcggcaaaatcgtggagaagaggattgaatgtaccgtctattcagtcgataataatgggaacatctacacacagcccgtggctcaatggcacgacagaggagagcaggaagtttttgaatactgtctcgaggacggatccctcatccgcgctactaaagatcataagtttatgaccgtggacggccagatgctgccaattgacgaaatttttgaacgagagctggatctgatgagagtcgacaaccttccaaactgagaattcaccggtggcgcgttaagtcgacaatcaacctctggattacaaaatttgtgaaagattgactggtattcttaactatgttgctccttttacgctatgtggatacgctgctttaatgcctttgtatcatgctattgcttcccgtatggctttcattttctcctccttgtataaatcctggttgctgtctctttatgaggagttgtggcccgttgtcaggcaacgtggcgtggtgtgcactgtgtttgctgacgcaacccccactggttggggcattgccaccacctgtcagctcctttccgggactttcgctttccccctccctattgccacggcggaactcatcgccgcctgccttgcccgctgctggacaggggctcggctgttgggcactgacaattccgtggtgttgtcggggaaatcatcgtcctttccttggctgctcgcctgtgttgccacctggattctgcgcgggacgtccttctgctacgtcccttcggccctcaatccagcggaccttccttcccgcggcctgctgccggctctgcggcctcttccgcgtcttcgccttcgccctcagacgagtcggatctccctttgggccgcctccccgcgtcgactttaagaccaatgacttacaaggcagctgtagatcttagccactttttaaaagaaaaggggggactggaagggctaattcactcccaacgaagacaagatctgctttttgcttgtactgggtctctctggttagaccagatctgagcctgggagctctctggctaactagggaacccactgcttaagcctcaataaagcttgccttgagtgcttcaagtagtgtgtgcccgtctgttgtgtgactctggtaactagagatccctcagacccttttagtcagtgtggaaaatctctagcagtacgtatagtagttcatgtcatcttattattcagtatttataacttgcaaagaaatgaatatcagagagtgagaggaacttgtttattgcagcttataatggttacaaataaagcaatagcatcacaaatttcacaaataaagcatttttttcactgcattctagttgtggtttgtccaaactcatcaatgtatcttatcatgtctggctctagctatcccgcccctaactccgcccatcccgcccctaactccgcccagttccgcccattctccgccccatggctgactaattttttttatttatgcagaggccgaggccgcctcggcctctgagctattccagaagtagtgaggaggcttttttggaggcctagggacgtacccaattcgccctatagtgagtcgtattacgcgcgctcactggccgtcgttttacaacgtcgtgactgggaaaaccctggcgttacccaacttaatcgccttgcagcacatccccctttcgccagctggcgtaatagcgaagaggcccgcaccgatcgcccttcccaacagttgcgcagcctgaatggcgaatgggacgcgccctgtagcggcgcattaagcgcggcgggtgtggtggttacgcgcagcgtgaccgctacacttgccagcgccctagcgcccgctcctttcgctttcttcccttcctttctcgccacgttcgccggctttccccgtcaagctctaaatcgggggctccctttagggttccgatttagtgctttacggcacctcgaccccaaaaaacttgattagggtgatggttcacgtagtgggccatcgccctgatagacggtttttcgccctttgacgttggagtccacgttctttaatagtggactcttgttccaaactggaacaacactcaaccctatctcggtctattcttttgatttataagggattttgccgatttcggcctattggttaaaaaatgagctgatttaacaaaaatttaacgcgaattttaacaaaatattaacgcttacaatttaggtggcacttttcggggaaatgtgcgcggaacccctatttgtttatttttctaaatacattcaaatatgtatccgctcatgagacaataaccctgataaatgcttcaataatattgaaaaaggaagagtatgagtattcaacatttccgtgtcgcccttattcccttttttgcggcattttgccttcctgtttttgctcacccagaaacgctggtgaaagtaaaagatgctgaagatcagttgggtgcacgagtgggttacatcgaactggatctcaacagcggtaagatccttgagagttttcgccccgaagaacgttttccaatgatgagcacttttaaagttctgctatgtggcgcggtattatcccgtattgacgccgggcaagagcaactcggtcgccgcatacactattctcagaatgacttggttgagtactcaccagtcacagaaaagcatcttacggatggcatgacagtaagagaattatgcagtgctgccataaccatgagtgataacactgcggccaacttacttctgacaacgatcggaggaccgaaggagctaaccgcttttttgcacaacatgggggatcatgtaactcgccttgatcgttgggaaccggagctgaatgaagccataccaaacgacgagcgtgacaccacgatgcctgtagcaatggcaacaacgttgcgcaaactattaactggcgaactacttactctagcttcccggcaacaattaatagactggatggaggcggataaagttgcaggaccacttctgcgctcggcccttccggctggctggtttattgctgataaatctggagccggtgagcgtgggtctcgcggtatcattgcagcactggggccagatggtaagccctcccgtatcgtagttatctacacgacggggagtcaggcaactatggatgaacgaaatagacagatcgctgagataggtgcctcactgattaagcattggtaactgtcagaccaagtttactcatatatactttagattgatttaaaacttcatttttaatttaaaaggatctaggtgaagatcctttttgataatctcatgaccaaaatcccttaacgtgagttttcgttccactgagcgtcagaccccgtagaaaagatcaaaggatcttcttgagatcctttttttctgcgcgtaatctgctgcttgcaaacaaaaaaaccaccgctaccagcggtggtttgtttgccggatcaagagctaccaactctttttccgaaggtaactggcttcagcagagcgcagataccaaatactgttcttctagtgtagccgtagttaggccaccacttcaagaactctgtagcaccgcctacatacctcgctctgctaatcctgttaccagtggctgctgccagtggcgataagtcgtgtcttaccgggttggactcaagacgatagttaccggataaggcgcagcggtcgggctgaacggggggttcgtgcacacagcccagcttggagcgaacgacctacaccgaactgagatacctacagcgtgagctatgagaaagcgccacgcttcccgaagggagaaaggcggacaggtatccggtaagcggcagggtcggaacaggagagcgcacgagggagcttccagggggaaacgcctggtatctttatagtcctgtcgggtttcgccacctctgacttgagcgtcgatttttgtgatgctcgtcaggggggcggagcctatggaaaaacgccagcaacgcggcctttttacggttcctggccttttgctggccttttgctcacatgttctttcctgcgttatcccctgattctgtggataaccgtattaccgcctttgagtgagctgataccgctcgccgcagccgaacgaccgagcgcagcgagtcagtgagcgaggaagcggaagagcgcccaatacgcaaaccgcctctccccgcgcgttggccgattcattaatgcagctggcacgacaggtttcccgactggaaagcgggcagtgagcgcaacgcaattaatgtgagttagctcactcattaggcaccccaggctttacactttatgcttccggctcgtatgttgtgtggaattgtgagcggataacaatttcacacaggaaacagctatgaccatgattacgccaagcgcgcaattaaccctcactaaagggaacaaaagctggagctgcaagcttaatgtagtcttatgcaatactcttgtagtcttgcaacatggtaacgatgagttagcaacatgccttacaaggagagaaaaagcaccgtgcatgccgattggtggaagtaaggtggtacgatcgtgccttattaggaaggcaacagacgggtctgacatggattggacgaaccactgaattgccgcattgcagagatattgtatttaagtgcctagctcgatacataaacgggtctctctggttagaccagatctgagcctgggagctctctggctaactagggaacccactgcttaagcctcaataaagcttgccttgagtgcttcaagtagtgtgtgcccgtctgttgtgtgactctggtaactagagatccctcagacccttttagtcagtgtggaaaatctctagcagtggcgcccgaacagggacttgaaagcgaaagggaaaccagaggagctctctcgacgcaggactcggcttgctgaagcgcgcacggcaagaggcgaggggcggcgactggtgagtacgccaaaaattttgactagcggaggctagaaggagagagatgggtgcgagagcgtcagtattaagcgggggagaattagatcgcgatgggaaaaaattcggttaaggccagggggaaagaaaaaatataaattaaaacatatagtatgggcaagcagggagctagaacgattcgcagttaatcctggcctgttagaaacatcagaaggctgtagacaaatactgggacagctacaaccatcccttcagacaggatcagaagaacttagatcattatataatacagtagcaaccctctattgtgtgcatcaaaggatagagataaaagacaccaaggaagctttagacaagatagaggaagagcaaaacaaaagtaagaccaccgcacagcaagcggccgctgatcttcagacctggaggaggagatatgagggacaattggagaagtgaattatataaatataaagtagtaaaaattgaaccattaggagtagcacccaccaaggcaaagagaagagtggtgcagagagaaaaaagagcagtgggaataggagctttgttccttgggttcttgggagcagcaggaagcactatgggcgcagcgtcaatgacgctgacggtacaggccagacaattattgtctggtatagtgcagcagcagaacaatttgctgagggctattgaggcgcaacagcatctgttgcaactcacagtctggggcatcaagcagctccaggcaagaatcctggctgtggaaagatacctaaaggatcaacagctcctggggatttggggttgctctggaaaactcatttgcaccactgctgtgccttggaatgctagttggagtaataaatctctggaacagatttggaatcacacgacctggatggagtgggacagagaaattaacaattacacaagcttaatacactccttaattgaagaatcgcaaaaccagcaagaaaagaatgaacaagaattattggaattagataaatgggcaagtttgtggaattggtttaacataacaaattggctgtggtatataaaattattcataatgatagtaggaggcttggtaggtttaagaatagtttttgctgtactttctatagtgaatagagttaggcagggatattcaccattatcgtttcagacccacctcccaaccccgaggggacccttgcgccttttccaaggcagccctgggtttgcgcagggacgcggctgctctgggcgtggttccgggaaacgcagcggcgccgaccctgggtctcgcacattcttcacgtccgttcgcagcgtcacccggatcttcgccgctacccttgtgggccccccggcgacgcttcctgctccgcccctaagtcgggaaggttccttgcggttcgcggcgtgccggacgtgacaaacggaagccgcacgtctcactagtaccctcgcagacggacagcgccagggagcaatggcagcgcgccgaccgcgatgggctgtggccaatagcggctgctcagcagggcgcgccgagagcagcggccgggaaggggcggtgcgggaggcggggtgtggggcggtagtgtgggccctgttcctgcccgcgcggtgttccgcattctgcaagcctccggagcgcacgtcggcagtcggctccctcgttgaccgaatcaccgacctctctccccagggggtacccagctgtctagagaattctagatcttgagacaaatggcagtattcatccacaattttaaaagaaaaggggggattggggggtacagtgcaggggaaagaatagtagacataatagcaacagacatacaaactaaagaattacaaaaacaaattacaaaaattcaaaattttcgggtttattacagggacagcagagatccactttggcgccggctcgaggggg

SEQ ID NO: 119 - DNA, 8990 bp, Artificial Sequence
  Synthetic Polynucleotide
cccggggttattaatagtaatcaattacggggtcattagttcatagcccatatatggagttccgcgttacataacttacggtaaatggcccgcctggctgaccgcccaacgacccccgcccattgacgtcaataatgacgtatgttcccatagtaacgccaatagggactttccattgacgtcaatgggtggagtatttacggtaaactgcccacttggcagtacatcaagtgtatcatatgccaagtacgccccctattgacgtcaatgacggtaaatggcccgcctggcattatgcccagtacatgaccttatgggactttcctacttggcagtacatctacgtattagtcatcgctattaccatggtgatgcggttttggcagtacatcaatgggcgtggatagcggtttgactcacggggatttccaagtctccaccccattgacgtcaatgggagtttgttttggcaccaaaatcaacgggactttccaaaatgtcgtaacaactccgccccattgacgcaaatgggcggtaggcgtgtacggtgggaggtctatataagcagagctctctggctaactgtcgggatcaacaagtttgtacaaaaaagcaggctccgaattcaccggtgccgccaccatggtgagcaagggcgaggaggataacatggccatcatcaaggagttcatgcgcttcaaggtgcacatggagggctccgtgaacggccacgagttcgagatcgagggcgagggcgagggccgcccctacgagggcacccagaccgccaagctgaaggtgaccaagggtggccccctgcccttcgcctgggacatcctgtcccctcagttcatgtacggctccaaggcctacgtgaagcaccccgccgacatccccgactacttgaagctgtccttccccgagggcttcaagtgggagcgcgtgatgaacttcgaggacggcggcgtggtgaccgtgacccaggactcctccctgcaggacggcgagttcatctacaaggtgaagctgcgcggcaccaacttcccctccgacggccccgtaatgcagaagaagaccatgggctgggaggcctcctccgagcggatgtaccccgaggacggcgccctgaagggcgagatcaagcagaggctgaagctgaaggacggcggccactacgacgctgaggtcaagaccacctacaaggccaagaagcccgtgcagctgcccggcgcctacaacgtcaacattaagttggacatcacctcccacaacgaggactacaccatcgtggaacagtacgaacgcgccgagggccgccactccaccggcggcatggacgagctgtacaagtgattaattaagaattcgacccagctttcttgtacaaagtggttggtaagcctatccctaaccctctcctcggtctcgattctacgtagtaatgagctagcagtctcgaggttaacgaattccgccccccccctaacgttactggccgaagccgcttggaataaggccggtgtgcgcttgtctatatgttattttccaccatattgccgtcttttggcaatgtgagggcccggaaacctggccctgtcttcttgacgagcattcctaggggtctttcccctctcgccaaaggaatgcaaggtctgttgaatgtcgtgaaggaagcagttcctctggaagcttcttgaagacaaacaacgtctgtagcgaccctttgcaggcagcggaaccccccacctggcgacaggtgcccctgcggccaaaagccacgtgtataagatacacctgcaaaggcggcacaaccccagtgccacgttgtgagttggatagttgtggaaagagtcaaatggctctcctcaagcgtattcaacaaggggctgaaggatgcccagaaggtaccccattgtatgggatctgatctggggcctcggtgcacatgctttacatgtgtttagtcgaggttaaaaaaacgtctaggccccccgaaccacggggacgtggttttcctttgaaaaacacgataataccatggccatgattaagatcgctacgcggaagtacctggggaaacagaacgtctacgacataggtgtggagcgcgatcacaactttgctctgaaaaatggatttatcgccagcaactgcttgccgaatatcatggtggaaaatggccgcttttctggattcatcgactgtggccggctgggtgtggcggaccgctatcaggacatagcgttggctacccgtgatattgctgaagagcttggcggcgaatgggctgaccgcttcctcgtgctttacggtatcgccgctcccgattcgcagcgcatcgccttctatcgccttcttgacgagttcttctgagaattcaccggtggcgcgttaagtcgacaatcaacctctggattacaaaatttgtgaaagattgactggtattcttaactatgttgctccttttacgctatgtggatacgctgctttaatgcctttgtatcatgctattgcttcccgtatggctttcattttctcctccttgtataaatcctggttgctgtctctttatgaggagttgtggcccgttgtcaggcaacgtggcgtggtgtgcactgtgtttgctgacgcaacccccactggttggggcattgccaccacctgtcagctcctttccgggactttcgctttccccctccctattgccacggcggaactcatcgccgcctgccttgcccgctgctggacaggggctcggctgttgggcactgacaattccgtggtgttgtcggggaaatcatcgtcctttccttggctgctcgcctgtgttgccacctggattctgcgcgggacgtccttctgctacgtcccttcggccctcaatccagcggaccttccttcccgcggcctgctgccggctctgcggcctcttccgcgtcttcgccttcgccctcagacgagtcggatctccctttgggccgcctccccgcgtcgactttaagaccaatgacttacaaggcagctgtagatcttagccactttttaaaagaaaaggggggactggaagggctaattcactcccaacgaagacaagatctgctttttgcttgtactgggtctctctggttagaccagatctgagcctgggagctctctggctaactagggaacccactgcttaagcctcaataaagcttgccttgagtgcttcaagtagtgtgtgcccgtctgttgtgtgactctggtaactagagatccctcagacccttttagtcagtgtggaaaatctctagcagtacgtatagtagttcatgtcatcttattattcagtatttataacttgcaaagaaatgaatatcagagagtgagaggaacttgtttattgcagcttataatggttacaaataaagcaatagcatcacaaatttcacaaataaagcatttttttcactgcattctagttgtggtttgtccaaactcatcaatgtatcttatcatgtctggctctagctatcccgcccctaactccgcccatcccgcccctaactccgcccagttccgcccattctccgccccatggctgactaattttttttatttatgcagaggccgaggccgcctcggcctctgagctattccagaagtagtgaggaggcttttttggaggcctagggacgtacccaattcgccctatagtgagtcgtattacgcgcgctcactggccgtcgttttacaacgtcgtgactgggaaaaccctggcgttacccaacttaatcgccttgcagcacatccccctttcgccagctggcgtaatagcgaagaggcccgcaccgatcgcccttcccaacagttgcgcagcctgaatggcgaatgggacgcgccctgtagcggcgcattaagcgcggcgggtgtggtggttacgcgcagcgtgaccgctacacttgccagcgccctagcgcccgctcctttcgctttcttcccttcctttctcgccacgttcgccggctttccccgtcaagctctaaatcgggggctccctttagggttccgatttagtgctttacggcacctcgaccccaaaaaacttgattagggtgatggttcacgtagtgggccatcgccctgatagacggtttttcgccctttgacgttggagtccacgttctttaatagtggactcttgttccaaactggaacaacactcaaccctatctcggtctattcttttgatttataagggattttgccgatttcggcctattggttaaaaaatgagctgatttaacaaaaatttaacgcgaattttaacaaaatattaacgcttacaatttaggtggcacttttcggggaaatgtgcgcggaacccctatttgtttatttttctaaatacattcaaatatgtatccgctcatgagacaataaccctgataaatgcttcaataatattgaaaaaggaagagtatgagtattcaacatttccgtgtcgcccttattcccttttttgcggcattttgccttcctgtttttgctcacccagaaacgctggtgaaagtaaaagatgctgaagatcagttgggtgcacgagtgggttacatcgaactggatctcaacagcggtaagatccttgagagttttcgccccgaagaacgttttccaatgatgagcacttttaaagttctgctatgtggcgcggtattatcccgtattgacgccgggcaagagcaactcggtcgccgcatacactattctcagaatgacttggttgagtactcaccagtcacagaaaagcatcttacggatggcatgacagtaagagaattatgcagtgctgccataaccatgagtgataacactgcggccaacttacttctgacaacgatcggaggaccgaaggagctaaccgcttttttgcacaacatgggggatcatgtaactcgccttgatcgttgggaaccggagctgaatgaagccataccaaacgacgagcgtgacaccacgatgcctgtagcaatggcaacaacgttgcgcaaactattaactggcgaactacttactctagcttcccggcaacaattaatagactggatggaggcggataaagttgcaggaccacttctgcgctcggcccttccggctggctggtttattgctgataaatctggagccggtgagcgtgggtctcgcggtatcattgcagcactggggccagatggtaagccctcccgtatcgtagttatctacacgacggggagtcaggcaactatggatgaacgaaatagacagatcgctgagataggtgcctcactgattaagcattggtaactgtcagaccaagtttactcatatatactttagattgatttaaaacttcatttttaatttaaaaggatctaggtgaagatcctttttgataatctcatgaccaaaatcccttaacgtgagttttcgttccactgagcgtcagaccccgtagaaaagatcaaaggatcttcttgagatcctttttttctgcgcgtaatctgctgcttgcaaacaaaaaaaccaccgctaccagcggtggtttgtttgccggatcaagagctaccaactctttttccgaaggtaactggcttcagcagagcgcagataccaaatactgttcttctagtgtagccgtagttaggccaccacttcaagaactctgtagcaccgcctacatacctcgctctgctaatcctgttaccagtggctgctgccagtggcgataagtcgtgtcttaccgggttggactcaagacgatagttaccggataaggcgcagcggtcgggctgaacggggggttcgtgcacacagcccagcttggagcgaacgacctacaccgaactgagatacctacagcgtgagctatgagaaagcgccacgcttcccgaagggagaaaggcggacaggtatccggtaagcggcagggtcggaacaggagagcgcacgagggagcttccagggggaaacgcctggtatctttatagtcctgtcgggtttcgccacctctgacttgagcgtcgatttttgtgatgctcgtcaggggggcggagcctatggaaaaacgccagcaacgcggcctttttacggttcctggccttttgctggccttttgctcacatgttctttcctgcgttatcccctgattctgtggataaccgtattaccgcctttgagtgagctgataccgctcgccgcagccgaacgaccgagcgcagcgagtcagtgagcgaggaagcggaagagcgcccaatacgcaaaccgcctctccccgcgcgttggccgattcattaatgcagctggcacgacaggtttcccgactggaaagcgggcagtgagcgcaacgcaattaatgtgagttagctcactcattaggcaccccaggctttacactttatgcttccggctcgtatgttgtgtggaattgtgagcggataacaatttcacacaggaaacagctatgaccatgattacgccaagcgcgcaattaaccctcactaaagggaacaaaagctggagctgcaagcttaatgtagtcttatgcaatactcttgtagtcttgcaacatggtaacgatgagttagcaacatgccttacaaggagagaaaaagcaccgtgcatgccgattggtggaagtaaggtggtacgatcgtgccttattaggaaggcaacagacgggtctgacatggattggacgaaccactgaattgccgcattgcagagatattgtatttaagtgcctagctcgatacataaacgggtctctctggttagaccagatctgagcctgggagctctctggctaactagggaacccactgcttaagcctcaataaagcttgccttgagtgcttcaagtagtgtgtgcccgtctgttgtgtgactctggtaactagagatccctcagacccttttagtcagtgtggaaaatctctagcagtggcgcccgaacagggacttgaaagcgaaagggaaaccagaggagctctctcgacgcaggactcggcttgctgaagcgcgcacggcaagaggcgaggggcggcgactggtgagtacgccaaaaattttgactagcggaggctagaaggagagagatgggtgcgagagcgtcagtattaagcgggggagaattagatcgcgatgggaaaaaattcggttaaggccagggggaaagaaaaaatataaattaaaacatatagtatgggcaagcagggagctagaacgattcgcagttaatcctggcctgttagaaacatcagaaggctgtagacaaatactgggacagctacaaccatcccttcagacaggatcagaagaacttagatcattatataatacagtagcaaccctctattgtgtgcatcaaaggatagagataaaagacaccaaggaagctttagacaagatagaggaagagcaaaacaaaagtaagaccaccgcacagcaagcggccgctgatcttcagacctggaggaggagatatgagggacaattggagaagtgaattatataaatataaagtagtaaaaattgaaccattaggagtagcacccaccaaggcaaagagaagagtggtgcagagagaaaaaagagcagtgggaataggagctttgttccttgggttcttgggagcagcaggaagcactatgggcgcagcgtcaatgacgctgacggtacaggccagacaattattgtctggtatagtgcagcagcagaacaatttgctgagggctattgaggcgcaacagcatctgttgcaactcacagtctggggcatcaagcagctccaggcaagaatcctggctgtggaaagatacctaaaggatcaacagctcctggggatttggggttgctctggaaaactcatttgcaccactgctgtgccttggaatgctagttggagtaataaatctctggaacagatttggaatcacacgacctggatggagtgggacagagaaattaacaattacacaagcttaatacactccttaattgaagaatcgcaaaaccagcaagaaaagaatgaacaagaattattggaattagataaatgggcaagtttgtggaattggtttaacataacaaattggctgtggtatataaaattattcataatgatagtaggaggcttggtaggtttaagaatagtttttgctgtactttctatagtgaatagagttaggcagggatattcaccattatcgtttcagacccacctcccaaccccgaggggacccttgcgccttttccaaggcagccctgggtttgcgcagggacgcggctgctctgggcgtggttccgggaaacgcagcggcgccgaccctgggtctcgcacattcttcacgtccgttcgcagcgtcacccggatcttcgccgctacccttgtgggccccccggcgacgcttcctgctccgcccctaagtcgggaaggttccttgcggttcgcggcgtgccggacgtgacaaacggaagccgcacgtctcactagtaccctcgcagacggacagcgccagggagcaatggcagcgcgccgaccgcgatgggctgtggccaatagcggctgctcagcagggcgcgccgagagcagcggccgggaaggggcggtgcgggaggcggggtgtggggcggtagtgtgggccctgttcctgcccgcgcggtgttccgcattctgcaagcctccggagcgcacgtcggcagtcggctccctcgttgaccgaatcaccgacctctctccccagggggtacccagctgtctagagaattctagatcttgagacaaatggcagtattcatccacaattttaaaagaaaaggggggattggggggtacagtgcaggggaaagaatagtagacataatagcaacagacatacaaactaaagaattacaaaaacaaattacaaaaattcaaaattttcgggtttattacagggacagcagagatccactttggcgccggctcgaggggg

SEQ ID NO: 120 - DNA, 9219 bp, Artificial Sequence; identical to SEQ ID NO: 78
  Synthetic Polynucleotide

SEQ ID NO: 121 - protein, 190 aa, Artificial Sequence; identical to SEQ ID NO: 79
  Synthetic Polypeptide

SEQ ID NO: 122 - DNA, 9639 bp, Artificial Sequence
  Synthetic Polynucleotide
cccggggttattaatagtaatcaattacggggtcattagttcatagcccatatatggagttccgcgttacataacttacggtaaatggcccgcctggctgaccgcccaacgacccccgcccattgacgtcaataatgacgtatgttcccatagtaacgccaatagggactttccattgacgtcaatgggtggagtatttacggtaaactgcccacttggcagtacatcaagtgtatcatatgccaagtacgccccctattgacgtcaatgacggtaaatggcccgcctggcattatgcccagtacatgaccttatgggactttcctacttggcagtacatctacgtattagtcatcgctattaccatggtgatgcggttttggcagtacatcaatgggcgtggatagcggtttgactcacggggatttccaagtctccaccccattgacgtcaatgggagtttgttttggcaccaaaatcaacgggactttccaaaatgtcgtaacaactccgccccattgacgcaaatgggcggtaggcgtgtacggtgggaggtctatataagcagagctctctggctaactgtcgggatcaacaagtttgtacaaaaaagcaggctccgaattcaccggtgccgccaccatggctcaactgaagaagaaactccaggccaataagaaagaactggcacagctgaagtggaagctgcaggcactgaaaaagaagctggcacagggcggaggaggctcaggcagtatgattaagatcgctacgcggaagtacctggggaaacagaacgtctacgacataggtgtggagcgcgatcacaactttgctctgaaaaatggatttatcgccagcaactgcggtggccccctgcccttctcctgggacatcctgtcccctcagttcatgtacggctccagggccttcaccaagcaccccgccgacatccccgactactataagcagtccttccccgagggcttcaagtgggagcgcgtgatgaacttcgaggacggcggcgccgtgaccgtgacccaggacacctccctggaggacggcaccctgatctacaaggtgaagctccgcggcaccaacttccctcctgacggccccgtaatgcagaagaagacaatgggctgggaagcgtccaccgagcggttgtaccccgaggacggcgtgctgaagggcgacattaagtgcctttcatacgagaccgagatcctgactgtcgagtacggattgcttcctatcggcaaaatcgtggagaagaggattgaatgtaccgtctattcagtcgataataatgggaacatctacacacagcccgtggctcaatggcacgacagaggagagcaggaagtttttgaatactgtctcgaggacggatccctcatccgcgctactaaagatcataagtttatgaccgtggacggccagatgctgccaattgacgaaatttttgaacgagagctggatctgatgagagtcgacaaccttccaaacggtggaggggggtcaggctctgcgcagctggaaaaggagcttcaagccctcgaaaaaaagttggcccagctcgagtgggagaaccaggctctggagaaagaactggcccagtgattaattaagaattcgacccagctttcttgtacaaagtggttggtaagcctatccctaaccctctcctcggtctcgattctacgtagtaatgagctagcagtctcgaggttaacgaattccgccccccccctaacgttactggccgaagccgcttggaataaggccggtgtgcgcttgtctatatgttattttccaccatattgccgtcttttggcaatgtgagggcccggaaacctggccctgtcttcttgacgagcattcctaggggtctttcccctctcgccaaaggaatgcaaggtctgttgaatgtcgtgaaggaagcagttcctctggaagcttcttgaagacaaacaacgtctgtagcgaccctttgcaggcagcggaaccccccacctggcgacaggtgcccctgcggccaaaagccacgtgtataagatacacctgcaaaggcggcacaaccccagtgccacgttgtgagttggatagttgtggaaagagtcaaatggctctcctcaagcgtattcaacaaggggctgaaggatgcccagaaggtaccccattgtatgggatctgatctggggcctcggtgcacatgctttacatgtgtttagtcgaggttaaaaaaacgtctaggccccccgaaccacggggacgtggttttcctttgaaaaacacgataataccatggtgagcaagggcgaggagctgttcaccggggtggtgcccatcctggtcgagctggacggcgacgtaaacggccacaagttcagcgtgtccggcgagggcgagggcgatgccacctacggcaagctgaccctgaagttcatctgcaccaccggcaagctgcccgtgccctggcccaccctcgtgaccaccctgacctacggcgtgcagtgcttcagccgctaccccgaccacatgaagcagcacgacttcttcaagtccgccatgcccgaaggctacgtccaggagcgcaccatcttcttcaaggacgacggcaactacaagacccgcgccgaggtgaagttcgagggcgacaccctggtgaaccgcatcgagctgaagggcatcgacttcaaggaggacggcaacatcctggggcacaagctggagtacaactacaacagccacaacgtctatatcatggccgacaagcagaagaacggcatcaaggtgaacttcaagatccgccacaacatcgaggacggcagcgtgcagctcgccgaccactaccagcagaacacccccatcggcgacggccccgtgctgctgcccgacaaccactacctgagcacccagtccgccctgagcaaagaccccaacgagaagcgcgatcacatggtcctgctggagttcgtgaccgccgccgggatcactctcggcatggacgagctgtacaagtaacaccggtggcgcgttaagtcgacaatcaacctctggattacaaaatttgtgaaagattgactggtattcttaactatgttgctccttttacgctatgtggatacgctgctttaatgcctttgtatcatgctattgcttcccgtatggctttcattttctcctccttgtataaatcctggttgctgtctctttatgaggagttgtggcccgttgtcaggcaacgtggcgtggtgtgcactgtgtttgctgacgcaacccccactggttggggcattgccaccacctgtcagctcctttccgggactttcgctttccccctccctattgccacggcggaactcatcgccgcctgccttgcccgctgctggacaggggctcggctgttgggcactgacaattccgtggtgttgtcggggaaatcatcgtcctttccttggctgctcgcctgtgttgccacctggattctgcgcgggacgtccttctgctacgtcccttcggccctcaatccagcggaccttccttcccgcggcctgctgccggctctgcggcctcttccgcgtcttcgccttcgccctcagacgagtcggatctccctttgggccgcctccccgcgtcgactttaagaccaatgacttacaaggcagctgtagatcttagccactttttaaaagaaaaggggggactggaagggctaattcactcccaacgaagacaagatctgctttttgcttgtactgggtctctctggttagaccagatctgagcctgggagctctctggctaactagggaacccactgcttaagcctcaataaagcttgccttgagtgcttcaagtagtgtgtgcccgtctgttgtgtgactctggtaactagagatccctcagacccttttagtcagtgtggaaaatctctagcagtacgtatagtagttcatgtcatcttattattcagtatttataacttgcaaagaaatgaatatcagagagtgagaggaacttgtttattgcagcttataatggttacaaataaagcaatagcatcacaaatttcacaaataaagcatttttttcactgcattctagttgtggtttgtccaaactcatcaatgtatcttatcatgtctggctctagctatcccgcccctaactccgcccatcccgcccctaactccgcccagttccgcccattctccgccccatggctgactaattttttttatttatgcagaggccgaggccgcctcggcctctgagctattccagaagtagtgaggaggcttttttggaggcctagggacgtacccaattcgccctatagtgagtcgtattacgcgcgctcactggccgtcgttttacaacgtcgtgactgggaaaaccctggcgttacccaacttaatcgccttgcagcacatccccctttcgccagctggcgtaatagcgaagaggcccgcaccgatcgcccttcccaacagttgcgcagcctgaatggcgaatgggacgcgccctgtagcggcgcattaagcgcggcgggtgtggtggttacgcgcagcgtgaccgctacacttgccagcgccctagcgcccgctcctttcgctttcttcccttcctttctcgccacgttcgccggctttccccgtcaagctctaaatcgggggctccctttagggttccgatttagtgctttacggcacctcgaccccaaaaaacttgattagggtgatggttcacgtagtgggccatcgccctgatagacggtttttcgccctttgacgttggagtccacgttctttaatagtggactcttgttccaaactggaacaacactcaaccctatctcggtctattcttttgatttataagggattttgccgatttcggcctattggttaaaaaatgagctgatttaacaaaaatttaacgcgaattttaacaaaatattaacgcttacaatttaggtggcacttttcggggaaatgtgcgcggaacccctatttgtttatttttctaaatacattcaaatatgtatccgctcatgagacaataaccctgataaatgcttcaataatattgaaaaaggaagagtatgagtattcaacatttccgtgtcgcccttattcccttttttgcggcattttgccttcctgtttttgctcacccagaaacgctggtgaaagtaaaagatgctgaagatcagttgggtgcacgagtgggttacatcgaactggatctcaacagcggtaagatccttgagagttttcgccccgaagaacgttttccaatgatgagcacttttaaagttctgctatgtggcgcggtattatcccgtattgacgccgggcaagagcaactcggtcgccgcatacactattctcagaatgacttggttgagtactcaccagtcacagaaaagcatcttacggatggcatgacagtaagagaattatgcagtgctgccataaccatgagtgataacactgcggccaacttacttctgacaacgatcggaggaccgaaggagctaaccgcttttttgcacaacatgggggatcatgtaactcgccttgatcgttgggaaccggagctgaatgaagccataccaaacgacgagcgtgacaccacgatgcctgtagcaatggcaacaacgttgcgcaaactattaactggcgaactacttactctagcttcccggcaacaattaatagactggatggaggcggataaagttgcaggaccacttctgcgctcggcccttccggctggctggtttattgctgataaatctggagccggtgagcgtgggtctcgcggtatcattgcagcactggggccagatggtaagccctcccgtatcgtagttatctacacgacggggagtcaggcaactatggatgaacgaaatagacagatcgctgagataggtgcctcactgattaagcattggtaactgtcagaccaagtttactcatatatactttagattgatttaaaacttcatttttaatttaaaaggatctaggtgaagatcctttttgataatctcatgaccaaaatcccttaacgtgagttttcgttccactgagcgtcagaccccgtagaaaagatcaaaggatcttcttgagatcctttttttctgcgcgtaatctgctgcttgcaaacaaaaaaaccaccgctaccagcggtggtttgtttgccggatcaagagctaccaactctttttccgaaggtaactggcttcagcagagcgcagataccaaatactgttcttctagtgtagccgtagttaggccaccacttcaagaactctgtagcaccgcctacatacctcgctctgctaatcctgttaccagtggctgctgccagtggcgataagtcgtgtcttaccgggttggactcaagacgatagttaccggataaggcgcagcggtcgggctgaacggggggttcgtgcacacagcccagcttggagcgaacgacctacaccgaactgagatacctacagcgtgagctatgagaaagcgccacgcttcccgaagggagaaaggcggacaggtatccggtaagcggcagggtcggaacaggagagcgcacgagggagcttccagggggaaacgcctggtatctttatagtcctgtcgggtttcgccacctctgacttgagcgtcgatttttgtgatgctcgtcaggggggcggagcctatggaaaaacgccagcaacgcggcctttttacggttcctggccttttgctggccttttgctcacatgttctttcctgcgttatcccctgattctgtggataaccgtattaccgcctttgagtgagctgataccgctcgccgcagccgaacgaccgagcgcagcgagtcagtgagcgaggaagcggaagagcgcccaatacgcaaaccgcctctccccgcgcgttggccgattcattaatgcagctggcacgacaggtttcccgactggaaagcgggcagtgagcgcaacgcaattaatgtgagttagctcactcattaggcaccccaggctttacactttatgcttccggctcgtatgttgtgtggaattgtgagcggataacaatttcacacaggaaacagctatgaccatgattacgccaagcgcgcaattaaccctcactaaagggaacaaaagctggagctgcaagcttaatgtagtcttatgcaatactcttgtagtcttgcaacatggtaacgatgagttagcaacatgccttacaaggagagaaaaagcaccgtgcatgccgattggtggaagtaaggtggtacgatcgtgccttattaggaaggcaacagacgggtctgacatggattggacgaaccactgaattgccgcattgcagagatattgtatttaagtgcctagctcgatacataaacgggtctctctggttagaccagatctgagcctgggagctctctggctaactagggaacccactgcttaagcctcaataaagcttgccttgagtgcttcaagtagtgtgtgcccgtctgttgtgtgactctggtaactagagatccctcagacccttttagtcagtgtggaaaatctctagcagtggcgcccgaacagggacttgaaagcgaaagggaaaccagaggagctctctcgacgcaggactcggcttgctgaagcgcgcacggcaagaggcgaggggcggcgactggtgagtacgccaaaaattttgactagcggaggctagaaggagagagatgggtgcgagagcgtcagtattaagcgggggagaattagatcgcgatgggaaaaaattcggttaaggccagggggaaagaaaaaatataaattaaaacatatagtatgggcaagcagggagctagaacgattcgcagttaatcctggcctgttagaaacatcagaaggctgtagacaaatactgggacagctacaaccatcccttcagacaggatcagaagaacttagatcattatataatacagtagcaaccctctattgtgtgcatcaaaggatagagataaaagacaccaaggaagctttagacaagatagaggaagagcaaaacaaaagtaagaccaccgcacagcaagcggccgctgatcttcagacctggaggaggagatatgagggacaattggagaagtgaattatataaatataaagtagtaaaaattgaaccattaggagtagcacccaccaaggcaaagagaagagtggtgcagagagaaaaaagagcagtgggaataggagctttgttccttgggttcttgggagcagcaggaagcactatgggcgcagcgtcaatgacgctgacggtacaggccagacaattattgtctggtatagtgcagcagcagaacaatttgctgagggctattgaggcgcaacagcatctgttgcaactcacagtctggggcatcaagcagctccaggcaagaatcctggctgtggaaagatacctaaaggatcaacagctcctggggatttggggttgctctggaaaactcatttgcaccactgctgtgccttggaatgctagttggagtaataaatctctggaacagatttggaatcacacgacctggatggagtgggacagagaaattaacaattacacaagcttaatacactccttaattgaagaatcgcaaaaccagcaagaaaagaatgaacaagaattattggaattagataaatgggcaagtttgtggaattggtttaacataacaaattggctgtggtatataaaattattcataatgatagtaggaggcttggtaggtttaagaatagtttttgctgtactttctatagtgaatagagttaggcagggatattcaccattatcgtttcagacccacctcccaaccccgaggggacccttgcgccttttccaaggcagccctgggtttgcgcagggacgcggctgctctgggcgtggttccgggaaacgcagcggcgccgaccctgggtctcgcacattcttcacgtccgttcgcagcgtcacccggatcttcgccgctacccttgtgggccccccggcgacgcttcctgctccgcccctaagtcgggaaggttccttgcggttcgcggcgtgccggacgtgacaaacggaagccgcacgtctcactagtaccctcgcagacggacagcgccagggagcaatggcagcgcgccgaccgcgatgggctgtggccaatagcggctgctcagcagggcgcgccgagagcagcggccgggaaggggcggtgcgggaggcggggtgtggggcggtagtgtgggccctgttcctgcccgcgcggtgttccgcattctgcaagcctccggagcgcacgtcggcagtcggctccctcgttgaccgaatcaccgacctctctccccagggggtacccagctgtctagagaattctagatcttgagacaaatggcagtattcatccacaattttaaaagaaaaggggggattggggggtacagtgcaggggaaagaatagtagacataatagcaacagacatacaaactaaagaattacaaaaacaaattacaaaaattcaaaattttcgggtttattacagggacagcagagatccactttggcgccggctcgaggggg

SEQ ID NO: 123 - protein, 326 aa, Artificial Sequence
  Synthetic Polypeptide
MAQLKKKLQANKKELAQLKWKLQALKKKLAQGGGGSGSMIKIATRKYLGKQNVYDIGVERDHNFALKNGFIASNCGGPLPFSWDILSPQFMYGSRAFTKHPADIPDYYKQSFPEGFKWERVMNFEDGGAVTVTQDTSLEDGTLIYKVKLRGTNFPPDGPVMQKKTMGWEASTERLYPEDGVLKGDIKCLSYETEILTVEYGLLPIGKIVEKRIECTVYSVDNNGNIYTQPVAQWHDRGEQEVFEYCLEDGSLIRATKDHKFMTVDGQMLPIDEIFERELDLMRVDNLPNGGGGSGSAQLEKELQALEKKLAQLEWENQALEKELAQ

SEQ ID NO: 124 - DNA, 9093 bp, Artificial Sequence; identical to SEQ ID NO: 96
  Synthetic Polynucleotide

SEQ ID NO: 125 - protein, 144 aa, Artificial Sequence; identical to SEQ ID NO: 97
  Synthetic Polypeptide

SEQ ID NO: 126 - DNA, 9159 bp, Artificial Sequence
  Synthetic Polynucleotide
cccggggttattaatagtaatcaattacggggtcattagttcatagcccatatatggagttccgcgttacataacttacggtaaatggcccgcctggctgaccgcccaacgacccccgcccattgacgtcaataatgacgtatgttcccatagtaacgccaatagggactttccattgacgtcaatgggtggagtatttacggtaaactgcccacttggcagtacatcaagtgtatcatatgccaagtacgccccctattgacgtcaatgacggtaaatggcccgcctggcattatgcccagtacatgaccttatgggactttcctacttggcagtacatctacgtattagtcatcgctattaccatggtgatgcggttttggcagtacatcaatgggcgtggatagcggtttgactcacggggatttccaagtctccaccccattgacgtcaatgggagtttgttttggcaccaaaatcaacgggactttccaaaatgtcgtaacaactccgccccattgacgcaaatgggcggtaggcgtgtacggtgggaggtctatataagcagagctctctggctaactgtcgggatcaacaagtttgtacaaaaaagcaggctccgaattcaccggtgccaccatgaaaaagcctgaactcaccgcgacgtctgtcgagaagtttctgatcgaaaagttcgacagcgtctccgacctgatgcagctctcggagggcgaagaatctcgtgctttcagcttcgatgtaggagggcgtggatatgtcctgcgggtaaatagctgcgccgatggtttctacaaagatcgttatgtttatcggcactttgcatcgtgcctttcatacgagaccgagatcctgactgtcgagtacggattgcttcctatcggcaaaatcgtggagaagaggattgaatgtaccgtctattcagtcgataataatgggaacatctacacacagcccgtggctcaatggcacgacagaggagagcaggaagtttttgaatactgtctcgaggacggatccctcatccgcgctactaaagatcataagtttatgaccgtggacggccagatgctgccaattgacgaaatttttgaacgagagctggatctgatgagagtcgacaaccttccaaactgattaattaagaattcgacccagctttcttgtacaaagtggttggtaagcctatccctaaccctctcctcggtctcgattctacgtagtaatgagctagcagtctcgaggttaacgaattccgccccccccctaacgttactggccgaagccgcttggaataaggccggtgtgcgcttgtctatatgttattttccaccatattgccgtcttttggcaatgtgagggcccggaaacctggccctgtcttcttgacgagcattcctaggggtctttcccctctcgccaaaggaatgcaaggtctgttgaatgtcgtgaaggaagcagttcctctggaagcttcttgaagacaaacaacgtctgtagcgaccctttgcaggcagcggaaccccccacctggcgacaggtgcccctgcggccaaaagccacgtgtataagatacacctgcaaaggcggcacaaccccagtgccacgttgtgagttggatagttgtggaaagagtcaaatggctctcctcaagcgtattcaacaaggggctgaaggatgcccagaaggtaccccattgtatgggatctgatctggggcctcggtgcacatgctttacatgtgtttagtcgaggttaaaaaaacgtctaggccccccgaaccacggggacgtggttttcctttgaaaaacacgataataccatggccatgagcgagctgattaaggagaacatgcacatgaagctgtacatggagggcaccgtggacaaccatcacttcaagtgcacatccgagggcgaaggcaagccctacgagggcacccagaccatgagaatcaaggtggtcgagggcggccctctccccttcgccttcgacatcctggctactagcttcctctacggcagcaagaccttcatcaaccacacccagggcatccccgacttcttcaagcagtccttccctgagggcttcacatgggagagagtcaccacatacgaagacgggggcgtgctgaccgctacccaggacaccagcctccaggacggctgcctcatctacaacgtcaagatcagaggggtgaacttcacatccaacggccctgtgatgcagaagaaaacactcggctgggaggccttcaccgagacgctgtaccccgctgacggcggcctggaaggcagaaacgacatggccctgaagctcgtgggcgggagccatctgatcgcaaacatcaagaccacatatagatccaagaaacccgctaagaacctcaagatgcctggcgtctactatgtggactacagactggaaagaatcaaggaggccaacaacgagacctacgtcgagcagcacgaggtggcagtggccagatactgcgacctccctagcaaactggggcacaagcttaattaacaccggtggcgcgttaagtcgacaatcaacctctggattacaaaatttgtgaaagattgactggtattcttaactatgttgctccttttacgctatgtggatacgctgctttaatgcctttgtatcatgctattgcttcccgtatggctttcattttctcctccttgtataaatcctggttgctgtctctttatgaggagttgtggcccgttgtcaggcaacgtggcgtggtgtgcactgtgtttgctgacgcaacccccactggttggggcattgccaccacctgtcagctcctttccgggactttcgctttccccctccctattgccacggcggaactcatcgccgcctgccttgcccgctgctggacaggggctcggctgttgggcactgacaattccgtggtgttgtcggggaaatcatcgtcctttccttggctgctcgcctgtgttgccacctggattctgcgcgggacgtccttctgctacgtcccttcggccctcaatccagcggaccttccttcccgcggcctgctgccggctctgcggcctcttccgcgtcttcgccttcgccctcagacgagtcggatctccctttgggccgcctccccgcgtcgactttaagaccaatgacttacaaggcagctgtagatcttagccactttttaaaagaaaaggggggactggaagggctaattcactcccaacgaagacaagatctgctttttgcttgtactgggtctctctggttagaccagatctgagcctgggagctctctggctaactagggaacccactgcttaagcctcaataaagcttgccttgagtgcttcaagtagtgtgtgcccgtctgttgtgtgactctggtaactagagatccctcagacccttttagtcagtgtggaaaatctctagcagtacgtatagtagttcatgtcatcttattattcagtatttataacttgcaaagaaatgaatatcagagagtgagaggaacttgtttattgcagcttataatggttacaaataaagcaatagcatcacaaatttcacaaataaagcatttttttcactgcattctagttgtggtttgtccaaactcatcaatgtatcttatcatgtctggctctagctatcccgcccctaactccgcccatcccgcccctaactccgcccagttccgcccattctccgccccatggctgactaattttttttatttatgcagaggccgaggccgcctcggcctctgagctattccagaagtagtgaggaggcttttttggaggcctagggacgtacccaattcgccctatagtgagtcgtattacgcgcgctcactggccgtcgttttacaacgtcgtgactgggaaaaccctggcgttacccaacttaatcgccttgcagcacatccccctttcgccagctggcgtaatagcgaagaggcccgcaccgatcgcccttcccaacagttgcgcagcctgaatggcgaatgggacgcgccctgtagcggcgcattaagcgcggcgggtgtggtggttacgcgcagcgtgaccgctacacttgccagcgccctagcgcccgctcctttcgctttcttcccttcctttctcgccacgttcgccggctttccccgtcaagctctaaatcgggggctccctttagggttccgatttagtgctttacggcacctcgaccccaaaaaacttgattagggtgatggttcacgtagtgggccatcgccctgatagacggtttttcgccctttgacgttggagtccacgttctttaatagtggactcttgttccaaactggaacaacactcaaccctatctcggtctattcttttgatttataagggattttgccgatttcggcctattggttaaaaaatgagctgatttaacaaaaatttaacgcgaattttaacaaaatattaacgcttacaatttaggtggcacttttcggggaaatgtgcgcggaacccctatttgtttatttttctaaatacattcaaatatgtatccgctcatgagacaataaccctgataaatgcttcaataatattgaaaaaggaagagtatgagtattcaacatttccgtgtcgcccttattcccttttttgcggcattttgccttcctgtttttgctcacccagaaacgctggtgaaagtaaaagatgctgaagatcagttgggtgcacgagtgggttacatcgaactggatctcaacagcggtaagatccttgagagttttcgccccgaagaacgttttccaatgatgagcacttttaaagttctgctatgtggcgcggtattatcccgtattgacgccgggcaagagcaactcggtcgccgcatacactattctcagaatgacttggttgagtactcaccagtcacagaaaagcatcttacggatggcatgacagtaagagaattatgcagtgctgccataaccatgagtgataacactgcggccaacttacttctgacaacgatcggaggaccgaaggagctaaccgcttttttgcacaacatgggggatcatgtaactcgccttgatcgttgggaaccggagctgaatgaagccataccaaacgacgagcgtgacaccacgatgcctgtagcaatggcaacaacgttgcgcaaactattaactggcgaactacttactctagcttcccggcaacaattaatagactggatggaggcggataaagttgcaggaccacttctgcgctcggcccttccggctggctggtttattgctgataaatctggagccggtgagcgtgggtctcgcggtatcattgcagcactggggccagatggtaagccctcccgtatcgtagttatctacacgacggggagtcaggcaactatggatgaacgaaatagacagatcgctgagataggtgcctcactgattaagcattggtaactgtcagaccaagtttactcatatatactttagattgatttaaaacttcatttttaatttaaaaggatctaggtgaagatcctttttgataatctcatgaccaaaatcccttaacgtgagttttcgttccactgagcgtcagaccccgtagaaaagatcaaaggatcttcttgagatcctttttttctgcgcgtaatctgctgcttgcaaacaaaaaaaccaccgctaccagcggtggtttgtttgccggatcaagagctaccaactctttttccgaaggtaactggcttcagcagagcgcagataccaaatactgttcttctagtgtagccgtagttaggccaccacttcaagaactctgtagcaccgcctacatacctcgctctgctaatcctgttaccagtggctgctgccagtggcgataagtcgtgtcttaccgggttggactcaagacgatagttaccggataaggcgcagcggtcgggctgaacggggggttcgtgcacacagcccagcttggagcgaacgacctacaccgaactgagatacctacagcgtgagctatgagaaagcgccacgcttcccgaagggagaaaggcggacaggtatccggtaagcggcagggtcggaacaggagagcgcacgagggagcttccagggggaaacgcctggtatctttatagtcctgtcgggtttcgccacctctgacttgagcgtcgatttttgtgatgctcgtcaggggggcggagcctatggaaaaacgccagcaacgcggcctttttacggttcctggccttttgctggccttttgctcacatgttctttcctgcgttatcccctgattctgtggataaccgtattaccgcctttgagtgagctgataccgctcgccgcagccgaacgaccgagcgcagcgagtcagtgagcgaggaagcggaagagcgcccaatacgcaaaccgcctctccccgcgcgttggccgattcattaatgcagctggcacgacaggtttcccgactggaaagcgggcagtgagcgcaacgcaattaatgtgagttagctcactcattaggcaccccaggctttacactttatgcttccggctcgtatgttgtgtggaattgtgagcggataacaatttcacacaggaaacagctatgaccatgattacgccaagcgcgcaattaaccctcactaaagggaacaaaagctggagctgcaagcttaatgtagtcttatgcaatactcttgtagtcttgcaacatggtaacgatgagttagcaacatgccttacaaggagagaaaaagcaccgtgcatgccgattggtggaagtaaggtggtacgatcgtgccttattaggaaggcaacagacgggtctgacatggattggacgaaccactgaattgccgcattgcagagatattgtatttaagtgcctagctcgatacataaacgggtctctctggttagaccagatctgagcctgggagctctctggctaactagggaacccactgcttaagcctcaataaagcttgccttgagtgcttcaagtagtgtgtgcccgtctgttgtgtgactctggtaactagagatccctcagacccttttagtcagtgtggaaaatctctagcagtggcgcccgaacagggacttgaaagcgaaagggaaaccagaggagctctctcgacgcaggactcggcttgctgaagcgcgcacggcaagaggcgaggggcggcgactggtgagtacgccaaaaattttgactagcggaggctagaaggagagagatgggtgcgagagcgtcagtattaagcgggggagaattagatcgcgatgggaaaaaattcggttaaggccagggggaaagaaaaaatataaattaaaacatatagtatgggcaagcagggagctagaacgattcgcagttaatcctggcctgttagaaacatcagaaggctgtagacaaatactgggacagctacaaccatcccttcagacaggatcagaagaacttagatcattatataatacagtagcaaccctctattgtgtgcatcaaaggatagagataaaagacaccaaggaagctttagacaagatagaggaagagcaaaacaaaagtaagaccaccgcacagcaagcggccgctgatcttcagacctggaggaggagatatgagggacaattggagaagtgaattatataaatataaagtagtaaaaattgaaccattaggagtagcacccaccaaggcaaagagaagagtggtgcagagagaaaaaagagcagtgggaataggagctttgttccttgggttcttgggagcagcaggaagcactatgggcgcagcgtcaatgacgctgacggtacaggccagacaattattgtctggtatagtgcagcagcagaacaatttgctgagggctattgaggcgcaacagcatctgttgcaactcacagtctggggcatcaagcagctccaggcaagaatcctggctgtggaaagatacctaaaggatcaacagctcctggggatttggggttgctctggaaaactcatttgcaccactgctgtgccttggaatgctagttggagtaataaatctctggaacagatttggaatcacacgacctggatggagtgggacagagaaattaacaattacacaagcttaatacactccttaattgaagaatcgcaaaaccagcaagaaaagaatgaacaagaattattggaattagataaatgggcaagtttgtggaattggtttaacataacaaattggctgtggtatataaaattattcataatgatagtaggaggcttggtaggtttaagaatagtttttgctgtactttctatagtgaatagagttaggcagggatattcaccattatcgtttcagacccacctcccaaccccgaggggacccttgcgccttttccaaggcagccctgggtttgcgcagggacgcggctgctctgggcgtggttccgggaaacgcagcggcgccgaccctgggtctcgcacattcttcacgtccgttcgcagcgtcacccggatcttcgccgctacccttgtgggccccccggcgacgcttcctgctccgcccctaagtcgggaaggttccttgcggttcgcggcgtgccggacgtgacaaacggaagccgcacgtctcactagtaccctcgcagacggacagcgccagggagcaatggcagcgcgccgaccgcgatgggctgtggccaatagcggctgctcagcagggcgcgccgagagcagcggccgggaaggggcggtgcgggaggcggggtgtggggcggtagtgtgggccctgttcctgcccgcgcggtgttccgcattctgcaagcctccggagcgcacgtcggcagtcggctccctcgttgaccgaatcaccgacctctctccccagggggtacccagctgtctagagaattctagatcttgagacaaatggcagtattcatccacaattttaaaagaaaaggggggattggggggtacagtgcaggggaaagaatagtagacataatagcaacagacatacaaactaaagaattacaaaaacaaattacaaaaattcaaaattttcgggtttattacagggacagcagagatccactttggcgccggctcgaggggg

SEQ ID NO: 127 - protein, 171 aa, Artificial Sequence
  Synthetic Polypeptide
MKKPELTATSVEKFLIEKFDSVSDLMQLSEGEESRAFSFDVGGRGYVLRVNSCADGFYKDRYVYRHFASCLSYETEILTVEYGLLPIGKIVEKRIECTVYSVDNNGNIYTQPVAQWHDRGEQEVFEYCLEDGSLIRATKDHKFMTVDGQMLPIDEIFERELDLMRVDNLPN

SEQ ID NO: 128 - DNA, 9579 bp, Artificial Sequence
  Synthetic Polynucleotide
cccggggttattaatagtaatcaattacggggtcattagttcatagcccatatatggagttccgcgttacataacttacggtaaatggcccgcctggctgaccgcccaacgacccccgcccattgacgtcaataatgacgtatgttcccatagtaacgccaatagggactttccattgacgtcaatgggtggagtatttacggtaaactgcccacttggcagtacatcaagtgtatcatatgccaagtacgccccctattgacgtcaatgacggtaaatggcccgcctggcattatgcccagtacatgaccttatgggactttcctacttggcagtacatctacgtattagtcatcgctattaccatggtgatgcggttttggcagtacatcaatgggcgtggatagcggtttgactcacggggatttccaagtctccaccccattgacgtcaatgggagtttgttttggcaccaaaatcaacgggactttccaaaatgtcgtaacaactccgccccattgacgcaaatgggcggtaggcgtgtacggtgggaggtctatataagcagagctctctggctaactgtcgggatcaacaagtttgtacaaaaaagcaggctccgaattcaccggtgccgccaccatgattaagatcgctacgcggaagtacctggggaaacagaacgtctacgacataggtgtggagcgcgatcacaactttgctctgaaaaatggatttatcgccagcaactgcgccgcgctcccgattccggaagtgcttgacattggggaatttagcgagagcctgacctattgcatctcccgccgtgcacagggtgtcacgttgcaagacctgcctgaaaccgaactgcccgctgttctgcagccggtcgcggaggccatggatgcgatcgctgcggccgatcttagccagacgagcgggttcggcccattcggaccgcaaggaatcggtcaatacactacatggcgtgatttcatatgcgcgattgctgatccccatgtgtatcactggcaaactgtgatggacgacaccgtcagtgcgtccgtcgcgcaggctctcgatgagctgatgctttgggccgaggactgccccgaagtccggcacctcgtgcacgcggatttcggctccaacaatgtcctgacggacaatggccgcataacagcggtcattgactggagcgaggcgatgttcggggattcccaatacgaggtcgccaacatcttcttctggaggccgtggttggcttgtatggagcagcagacgcgctacttcgagcggaggcatccggagcttgcaggatcgccgcggctccgggcgtatatgctccgcattggtcttgaccaactctatcagagcttggttgacggcaatttcgatgatgcagcttgggcgcagggtcgatgcgacgcaatcgtccgatccggagccgggactgtcgggcgtacacaaatcgcccgcagaagcgcggccgtctggaccgatggctgtgtagaagtactcgccgatagtggaaaccgacgccccagcactcgtccgagggcaaaggaatagttaattaagaattcgacccagctttcttgtacaaagtggttggtaagcctatccctaaccctctcctcggtctcgattctacgtagtaatgagctagcagtctcgaggttaacgaattccgccccccccctaacgttactggccgaagccgcttggaataaggccggtgtgcgcttgtctatatgttattttccaccatattgccgtcttttggcaatgtgagggcccggaaacctggccctgtcttcttgacgagcattcctaggggtctttcccctctcgccaaaggaatgcaaggtctgttgaatgtcgtgaaggaagcagttcctctggaagcttcttgaagacaaacaacgtctgtagcgaccctttgcaggcagcggaaccccccacctggcgacaggtgcccctgcggccaaaagccacgtgtataagatacacctgcaaaggcggcacaaccccagtgccacgttgtgagttggatagttgtggaaagagtcaaatggctctcctcaagcgtattcaacaaggggctgaaggatgcccagaaggtaccccattgtatgggatctgatctggggcctcggtgcacatgctttacatgtgtttagtcgaggttaaaaaaacgtctaggccccccgaaccacggggacgtggttttcctttgaaaaacacgataataccatggtgagcaagggcgaggaggataacatggccatcatcaaggagttcatgcgcttcaaggtgcacatggagggctccgtgaacggccacgagttcgagatcgagggcgagggcgagggccgcccctacgagggcacccagaccgccaagctgaaggtgaccaagggtggccccctgcccttcgcctgggacatcctgtcccctcagttcatgtacggctccaaggcctacgtgaagcaccccgccgacatccccgactacttgaagctgtccttccccgagggcttcaagtgggagcgcgtgatgaacttcgaggacggcggcgtggtgaccgtgacccaggactcctccctgcaggacggcgagttcatctacaaggtgaagctgcgcggcaccaacttcccctccgacggccccgtaatgcagaagaagaccatgggctgggaggcctcctccgagcggatgtaccccgaggacggcgccctgaagggcgagatcaagcagaggctgaagctgaaggacggcggccactacgacgctgaggtcaagaccacctacaaggccaagaagcccgtgcagctgcccggcgcctacaacgtcaacatcaagttggacatcacctcccacaacgaggactacaccatcgtggaacagtacgaacgcgccgagggccgccactccaccggcggcatggacgagctgtacaagtaacaccggtggcgcgttaagtcgacaatcaacctctggattacaaaatttgtgaaagattgactggtattcttaactatgttgctccttttacgctatgtggatacgctgctttaatgcctttgtatcatgctattgcttcccgtatggctttcattttctcctccttgtataaatcctggttgctgtctctttatgaggagttgtggcccgttgtcaggcaacgtggcgtggtgtgcactgtgtttgctgacgcaacccccactggttggggcattgccaccacctgtcagctcctttccgggactttcgctttccccctccctattgccacggcggaactcatcgccgcctgccttgcccgctgctggacaggggctcggctgttgggcactgacaattccgtggtgttgtcggggaaatcatcgtcctttccttggctgctcgcctgtgttgccacctggattctgcgcgggacgtccttctgctacgtcccttcggccctcaatccagcggaccttccttcccgcggcctgctgccggctctgcggcctcttccgcgtcttcgccttcgccctcagacgagtcggatctccctttgggccgcctccccgcgtcgactttaagaccaatgacttacaaggcagctgtagatcttagccactttttaaaagaaaaggggggactggaagggctaattcactcccaacgaagacaagatctgctttttgcttgtactgggtctctctggttagaccagatctgagcctgggagctctctggctaactagggaacccactgcttaagcctcaataaagcttgccttgagtgcttcaagtagtgtgtgcccgtctgttgtgtgactctggtaactagagatccctcagacccttttagtcagtgtggaaaatctctagcagtacgtatagtagttcatgtcatcttattattcagtatttataacttgcaaagaaatgaatatcagagagtgagaggaacttgtttattgcagcttataatggttacaaataaagcaatagcatcacaaatttcacaaataaagcatttttttcactgcattctagttgtggtttgtccaaactcatcaatgtatcttatcatgtctggctctagctatcccgcccctaactccgcccatcccgcccctaactccgcccagttccgcccattctccgccccatggctgactaattttttttatttatgcagaggccgaggccgcctcggcctctgagctattccagaagtagtgaggaggcttttttggaggcctagggacgtacccaattcgccctatagtgagtcgtattacgcgcgctcactggccgtcgttttacaacgtcgtgactgggaaaaccctggcgttacccaacttaatcgccttgcagcacatccccctttcgccagctggcgtaatagcgaagaggcccgcaccgatcgcccttcccaacagttgcgcagcctgaatggcgaatgggacgcgccctgtagcggcgcattaagcgcggcgggtgtggtggttacgcgcagcgtgaccgctacacttgccagcgccctagcgcccgctcctttcgctttcttcccttcctttctcgccacgttcgccggctttccccgtcaagctctaaatcgggggctccctttagggttccgatttagtgctttacggcacctcgaccccaaaaaacttgattagggtgatggttcacgtagtgggccatcgccctgatagacggtttttcgccctttgacgttggagtccacgttctttaatagtggactcttgttccaaactggaacaacactcaaccctatctcggtctattcttttgatttataagggattttgccgatttcggcctattggttaaaaaatgagctgatttaacaaaaatttaacgcgaattttaacaaaatattaacgcttacaatttaggtggcacttttcggggaaatgtgcgcggaacccctatttgtttatttttctaaatacattcaaatatgtatccgctcatgagacaataaccctgataaatgcttcaataatattgaaaaaggaagagtatgagtattcaacatttccgtgtcgcccttattcccttttttgcggcattttgccttcctgtttttgctcacccagaaacgctggtgaaagtaaaagatgctgaagatcagttgggtgcacgagtgggttacatcgaactggatctcaacagcggtaagatccttgagagttttcgccccgaagaacgttttccaatgatgagcacttttaaagttctgctatgtggcgcggtattatcccgtattgacgccgggcaagagcaactcggtcgccgcatacactattctcagaatgacttggttgagtactcaccagtcacagaaaagcatcttacggatggcatgacagtaagagaattatgcagtgctgccataaccatgagtgataacactgcggccaacttacttctgacaacgatcggaggaccgaaggagctaaccgcttttttgcacaacatgggggatcatgtaactcgccttgatcgttgggaaccggagctgaatgaagccataccaaacgacgagcgtgacaccacgatgcctgtagcaatggcaacaacgttgcgcaaactattaactggcgaactacttactctagcttcccggcaacaattaatagactggatggaggcggataaagttgcaggaccacttctgcgctcggcccttccggctggctggtttattgctgataaatctggagccggtgagcgtgggtctcgcggtatcattgcagcactggggccagatggtaagccctcccgtatcgtagttatctacacgacggggagtcaggcaactatggatgaacgaaatagacagatcgctgagataggtgcctcactgattaagcattggtaactgtcagaccaagtttactcatatatactttagattgatttaaaacttcatttttaatttaaaaggatctaggtgaagatcctttttgataatctcatgaccaaaatcccttaacgtgagttttcgttccactgagcgtcagaccccgtagaaaagatcaaaggatcttcttgagatcctttttttctgcgcgtaatctgctgcttgcaaacaaaaaaaccaccgctaccagcggtggtttgtttgccggatcaagagctaccaactctttttccgaaggtaactggcttcagcagagcgcagataccaaatactgttcttctagtgtagccgtagttaggccaccacttcaagaactctgtagcaccgcctacatacctcgctctgctaatcctgttaccagtggctgctgccagtggcgataagtcgtgtcttaccgggttggactcaagacgatagttaccggataaggcgcagcggtcgggctgaacggggggttcgtgcacacagcccagcttggagcgaacgacctacaccgaactgagatacctacagcgtgagctatgagaaagcgccacgcttcccgaagggagaaaggcggacaggtatccggtaagcggcagggtcggaacaggagagcgcacgagggagcttccagggggaaacgcctggtatctttatagtcctgtcgggtttcgccacctctgacttgagcgtcgatttttgtgatgctcgtcaggggggcggagcctatggaaaaacgccagcaacgcggcctttttacggttcctggccttttgctggccttttgctcacatgttctttcctgcgttatcccctgattctgtggataaccgtattaccgcctttgagtgagctgataccgctcgccgcagccgaacgaccgagcgcagcgagtcagtgagcgaggaagcggaagagcgcccaatacgcaaaccgcctctccccgcgcgttggccgattcattaatgcagctggcacgacaggtttcccgactggaaagcgggcagtgagcgcaacgcaattaatgtgagttagctcactcattaggcaccccaggctttacactttatgcttccggctcgtatgttgtgtggaattgtgagcggataacaatttcacacaggaaacagctatgaccatgattacgccaagcgcgcaattaaccctcactaaagggaacaaaagctggagctgcaagcttaatgtagtcttatgcaatactcttgtagtcttgcaacatggtaacgatgagttagcaacatgccttacaaggagagaaaaagcaccgtgcatgccgattggtggaagtaaggtggtacgatcgtgccttattaggaaggcaacagacgggtctgacatggattggacgaaccactgaattgccgcattgcagagatattgtatttaagtgcctagctcgatacataaacgggtctctctggttagaccagatctgagcctgggagctctctggctaactagggaacccactgcttaagcctcaataaagcttgccttgagtgcttcaagtagtgtgtgcccgtctgttgtgtgactctggtaactagagatccctcagacccttttagtcagtgtggaaaatctctagcagtggcgcccgaacagggacttgaaagcgaaagggaaaccagaggagctctctcgacgcaggactcggcttgctgaagcgcgcacggcaagaggcgaggggcggcgactggtgagtacgccaaaaattttgactagcggaggctagaaggagagagatgggtgcgagagcgtcagtattaagcgggggagaattagatcgcgatgggaaaaaattcggttaaggccagggggaaagaaaaaatataaattaaaacatatagtatgggcaagcagggagctagaacgattcgcagttaatcctggcctgttagaaacatcagaaggctgtagacaaatactgggacagctacaaccatcccttcagacaggatcagaagaacttagatcattatataatacagtagcaaccctctattgtgtgcatcaaaggatagagataaaagacaccaaggaagctttagacaagatagaggaagagcaaaacaaaagtaagaccaccgcacagcaagcggccgctgatcttcagacctggaggaggagatatgagggacaattggagaagtgaattatataaatataaagtagtaaaaattgaaccattaggagtagcacccaccaaggcaaagagaagagtggtgcagagagaaaaaagagcagtgggaataggagctttgttccttgggttcttgggagcagcaggaagcactatgggcgcagcgtcaatgacgctgacggtacaggccagacaattattgtctggtatagtgcagcagcagaacaatttgctgagggctattgaggcgcaacagcatctgttgcaactcacagtctggggcatcaagcagctccaggcaagaatcctggctgtggaaagatacctaaaggatcaacagctcctggggatttggggttgctctggaaaactcatttgcaccactgctgtgccttggaatgctagttggagtaataaatctctggaacagatttggaatcacacgacctggatggagtgggacagagaaattaacaattacacaagcttaatacactccttaattgaagaatcgcaaaaccagcaagaaaagaatgaacaagaattattggaattagataaatgggcaagtttgtggaattggtttaacataacaaattggctgtggtatataaaattattcataatgatagtaggaggcttggtaggtttaagaatagtttttgctgtactttctatagtgaatagagttaggcagggatattcaccattatcgtttcagacccacctcccaaccccgaggggacccttgcgccttttccaaggcagccctgggtttgcgcagggacgcggctgctctgggcgtggttccgggaaacgcagcggcgccgaccctgggtctcgcacattcttcacgtccgttcgcagcgtcacccggatcttcgccgctacccttgtgggccccccggcgacgcttcctgctccgcccctaagtcgggaaggttccttgcggttcgcggcgtgccggacgtgacaaacggaagccgcacgtctcactagtaccctcgcagacggacagcgccagggagcaatggcagcgcgccgaccgcgatgggctgtggccaatagcggctgctcagcagggcgcgccgagagcagcggccgggaaggggcggtgcgggaggcggggtgtggggcggtagtgtgggccctgttcctgcccgcgcggtgttccgcattctgcaagcctccggagcgcacgtcggcagtcggctccctcgttgaccgaatcaccgacctctctccccagggggtacccagctgtctagagaattctagatcttgagacaaatggcagtattcatccacaattttaaaagaaaaggggggattggggggtacagtgcaggggaaagaatagtagacataatagcaacagacatacaaactaaagaattacaaaaacaaattacaaaaattcaaaattttcgggtttattacagggacagcagagatccactttggcgccggctcgaggggg

SEQ ID NO: 129 - protein, 309 aa, Artificial Sequence
  Synthetic Polypeptide
MIKIATRKYLGKQNVYDIGVERDHNFALKNGFIASNCAALPIPEVLDIGEFSESLTYCISRRAQGVTLQDLPETELPAVLQPVAEAMDAIAAADLSQTSGFGPFGPQGIGQYTTWRDFICAIADPHVYHWQTVMDDTVSASVAQALDELMLWAEDCPEVRHLVHADFGSNNVLTDNGRITAVIDWSEAMFGDSQYEVANIFFWRPWLACMEQQTRYFERRHPELAGSPRLRAYMLRIGLDQLYQSLVDGNFDDAAWAQGRCDAIVRSGAGTVGRTQIARRSAAVWTDGCVEVLADSGNRRPSTRPRAKE

SEQ ID NO: 130 - DNA, 9345 bp, Artificial Sequence
  Synthetic Polynucleotide
cccggggttattaatagtaatcaattacggggtcattagttcatagcccatatatggagttccgcgttacataacttacggtaaatggcccgcctggctgaccgcccaacgacccccgcccattgacgtcaataatgacgtatgttcccatagtaacgccaatagggactttccattgacgtcaatgggtggagtatttacggtaaactgcccacttggcagtacatcaagtgtatcatatgccaagtacgccccctattgacgtcaatgacggtaaatggcccgcctggcattatgcccagtacatgaccttatgggactttcctacttggcagtacatctacgtattagtcatcgctattaccatggtgatgcggttttggcagtacatcaatgggcgtggatagcggtttgactcacggggatttccaagtctccaccccattgacgtcaatgggagtttgttttggcaccaaaatcaacgggactttccaaaatgtcgtaacaactccgccccattgacgcaaatgggcggtaggcgtgtacggtgggaggtctatataagcagagctctctggctaactgtcgggatcaacaagtttgtacaaaaaagcaggctccgaattcaccggtgccaccatgaaaaagcctgaactcaccgcgacgtctgtcgagaagtttctgatcgaaaagttcgacagcgtctccgacctgatgcagctctcggagggcgaagaatctcgtgctttcagcttcgatgtaggagggcgtggatatgtcctgcgggtaaatagctgcgccgatggtttctacaaagatcgttatgtttatcggcactttgcatcggccgcgctcccgattccggaagtgcttgacattggggaatttagcgagagcctgacctattgcatctcccgccgtgcacagggtgtcacgttgcaagacctgcctgaaaccgaactgcccgctgttctgcagccggtcgcggaggccatggatgcgatcgctgcggccgatcttagccagacgagctgcctttcatacgagaccgagatcctgactgtcgagtacggattgcttcctatcggcaaaatcgtggagaagaggattgaatgtaccgtctattcagtcgataataatgggaacatctacacacagcccgtggctcaatggcacgacagaggagagcaggaagtttttgaatactgtctcgaggacggatccctcatccgcgctactaaagatcataagtttatgaccgtggacggccagatgctgccaattgacgaaatttttgaacgagagctggatctgatgagagtcgacaaccttccaaactgattaattaagaattcgacccagctttcttgtacaaagtggttggtaagcctatccctaaccctctcctcggtctcgattctacgtagtaatgagctagcagtctcgaggttaacgaattccgccccccccctaacgttactggccgaagccgcttggaataaggccggtgtgcgcttgtctatatgttattttccaccatattgccgtcttttggcaatgtgagggcccggaaacctggccctgtcttcttgacgagcattcctaggggtctttcccctctcgccaaaggaatgcaaggtctgttgaatgtcgtgaaggaagcagttcctctggaagcttcttgaagacaaacaacgtctgtagcgaccctttgcaggcagcggaaccccccacctggcgacaggtgcccctgcggccaaaagccacgtgtataagatacacctgcaaaggcggcacaaccccagtgccacgttgtgagttggatagttgtggaaagagtcaaatggctctcctcaagcgtattcaacaaggggctgaaggatgcccagaaggtaccccattgtatgggatctgatctggggcctcggtgcacatgctttacatgtgtttagtcgaggttaaaaaaacgtctaggccccccgaaccacggggacgtggttttcctttgaaaaacacgataataccatggccatgagcgagctgattaaggagaacatgcacatgaagctgtacatggagggcaccgtggacaaccatcacttcaagtgcacatccgagggcgaaggcaagccctacgagggcacccagaccatgagaatcaaggtggtcgagggcggccctctccccttcgccttcgacatcctggctactagcttcctctacggcagcaagaccttcatcaaccacacccagggcatccccgacttcttcaagcagtccttccctgagggcttcacatgggagagagtcaccacatacgaagacgggggcgtgctgaccgctacccaggacaccagcctccaggacggctgcctcatctacaacgtcaagatcagaggggtgaacttcacatccaacggccctgtgatgcagaagaaaacactcggctgggaggccttcaccgagacgctgtaccccgctgacggcggcctggaaggcagaaacgacatggccctgaagctcgtgggcgggagccatctgatcgcaaacatcaagaccacatatagatccaagaaacccgctaagaacctcaagatgcctggcgtctactatgtggactacagactggaaagaatcaaggaggccaacaacgagacctacgtcgagcagcacgaggtggcagtggccagatactgcgacctccctagcaaactggggcacaagcttaattaacaccggtggcgcgttaagtcgacaatcaacctctggattacaaaatttgtgaaagattgactggtattcttaactatgttgctccttttacgctatgtggatacgctgctttaatgcctttgtatcatgctattgcttcccgtatggctttcattttctcctccttgtataaatcctggttgctgtctctttatgaggagttgtggcccgttgtcaggcaacgtggcgtggtgtgcactgtgtttgctgacgcaacccccactggttggggcattgccaccacctgtcagctcctttccgggactttcgctttccccctccctattgccacggcggaactcatcgccgcctgccttgcccgctgctggacaggggctcggctgttgggcactgacaattccgtggtgttgtcggggaaatcatcgtcctttccttggctgctcgcctgtgttgccacctggattctgcgcgggacgtccttctgctacgtcccttcggccctcaatccagcggaccttccttcccgcggcctgctgccggctctgcggcctcttccgcgtcttcgccttcgccctcagacgagtcggatctccctttgggccgcctccccgcgtcgactttaagaccaatgacttacaaggcagctgtagatcttagccactttttaaaagaaaaggggggactggaagggctaattcactcccaacgaagacaagatctgctttttgcttgtactgggtctctctggttagaccagatctgagcctgggagctctctggctaactagggaacccactgcttaagcctcaataaagcttgccttgagtgcttcaagtagtgtgtgcccgtctgttgtgtgactctggtaactagagatccctcagacccttttagtcagtgtggaaaatctctagcagtacgtatagtagttcatgtcatcttattattcagtatttataacttgcaaagaaatgaatatcagagagtgagaggaacttgtttattgcagcttataatggttacaaataaagcaatagcatcacaaatttcacaaataaagcatttttttcactgcattctagttgtggtttgtccaaactcatcaatgtatcttatcatgtctggctctagctatcccgcccctaactccgcccatcccgcccctaactccgcccagttccgcccattctccgccccatggctgactaattttttttatttatgcagaggccgaggccgcctcggcctctgagctattccagaagtagtgaggaggcttttttggaggcctagggacgtacccaattcgccctatagtgagtcgtattacgcgcgctcactggccgtcgttttacaacgtcgtgactgggaaaaccctggcgttacccaacttaatcgccttgcagcacatccccctttcgccagctggcgtaatagcgaagaggcccgcaccgatcgcccttcccaacagttgcgcagcctgaatggcgaatgggacgcgccctgtagcggcgcattaagcgcggcgggtgtggtggttacgcgcagcgtgaccgctacacttgccagcgccctagcgcccgctcctttcgctttcttcccttcctttctcgccacgttcgccggctttccccgtcaagctctaaatcgggggctccctttagggttccgatttagtgctttacggcacctcgaccccaaaaaacttgattagggtgatggttcacgtagtgggccatcgccctgatagacggtttttcgccctttgacgttggagtccacgttctttaatagtggactcttgttccaaactggaacaacactcaaccctatctcggtctattcttttgatttataagggattttgccgatttcggcctattggttaaaaaatgagctgatttaacaaaaatttaacgcgaattttaacaaaatattaacgcttacaatttaggtggcacttttcggggaaatgtgcgcggaacccctatttgtttatttttctaaatacattcaaatatgtatccgctcatgagacaataaccctgataaatgcttcaataatattgaaaaaggaagagtatgagtattcaacatttccgtgtcgcccttattcccttttttgcggcattttgccttcctgtttttgctcacccagaaacgctggtgaaagtaaaagatgctgaagatcagttgggtgcacgagtgggttacatcgaactggatctcaacagcggtaagatccttgagagttttcgccccgaagaacgttttccaatgatgagcacttttaaagttctgctatgtggcgcggtattatcccgtattgacgccgggcaagagcaactcggtcgccgcatacactattctcagaatgacttggttgagtactcaccagtcacagaaaagcatcttacggatggcatgacagtaagagaattatgcagtgctgccataaccatgagtgataacactgcggccaacttacttctgacaacgatcggaggaccgaaggagctaaccgcttttttgcacaacatgggggatcatgtaactcgccttgatcgttgggaaccggagctgaatgaagccataccaaacgacgagcgtgacaccacgatgcctgtagcaatggcaacaacgttgcgcaaactattaactggcgaactacttactctagcttcccggcaacaattaatagactggatggaggcggataaagttgcaggaccacttctgcgctcggcccttccggctggctggtttattgctgataaatctggagccggtgagcgtgggtctcgcggtatcattgcagcactggggccagatggtaagccctcccgtatcgtagttatctacacgacggggagtcaggcaactatggatgaacgaaatagacagatcgctgagataggtgcctcactgattaagcattggtaactgtcagaccaagtttactcatatatactttagattgatttaaaacttcatttttaatttaaaaggatctaggtgaagatcctttttgataatctcatgaccaaaatcccttaacgtgagttttcgttccactgagcgtcagaccccgtagaaaagatcaaaggatcttcttgagatcctttttttctgcgcgtaatctgctgcttgcaaacaaaaaaaccaccgctaccagcggtggtttgtttgccggatcaagagctaccaactctttttccgaaggtaactggcttcagcagagcgcagataccaaatactgttcttctagtgtagccgtagttaggccaccacttcaagaactctgtagcaccgcctacatacctcgctctgctaatcctgttaccagtggctgctgccagtggcgataagtcgtgtcttaccgggttggactcaagacgatagttaccggataaggcgcagcggtcgggctgaacggggggttcgtgcacacagcccagcttggagcgaacgacctacaccgaactgagatacctacagcgtgagctatgagaaagcgccacgcttcccgaagggagaaaggcggacaggtatccggtaagcggcagggtcggaacaggagagcgcacgagggagcttccagggggaaacgcctggtatctttatagtcctgtcgggtttcgccacctctgacttgagcgtcgatttttgtgatgctcgtcaggggggcggagcctatggaaaaacgccagcaacgcggcctttttacggttcctggccttttgctggccttttgctcacatgttctttcctgcgttatcccctgattctgtggataaccgtattaccgcctttgagtgagctgataccgctcgccgcagccgaacgaccgagcgcagcgagtcagtgagcgaggaagcggaagagcgcccaatacgcaaaccgcctctccccgcgcgttggccgattcattaatgcagctggcacgacaggtttcccgactggaaagcgggcagtgagcgcaacgcaattaatgtgagttagctcactcattaggcaccccaggctttacactttatgcttccggctcgtatgttgtgtggaattgtgagcggataacaatttcacacaggaaacagctatgaccatgattacgccaagcgcgcaattaaccctcactaaagggaacaaaagctggagctgcaagcttaatgtagtcttatgcaatactcttgtagtcttgcaacatggtaacgatgagttagcaacatgccttacaaggagagaaaaagcaccgtgcatgccgattggtggaagtaaggtggtacgatcgtgccttattaggaaggcaacagacgggtctgacatggattggacgaaccactgaattgccgcattgcagagatattgtatttaagtgcctagctcgatacataaacgggtctctctggttagaccagatctgagcctgggagctctctggctaactagggaacccactgcttaagcctcaataaagcttgccttgagtgcttcaagtagtgtgtgcccgtctgttgtgtgactctggtaactagagatccctcagacccttttagtcagtgtggaaaatctctagcagtggcgcccgaacagggacttgaaagcgaaagggaaaccagaggagctctctcgacgcaggactcggcttgctgaagcgcgcacggcaagaggcgaggggcggcgactggtgagtacgccaaaaattttgactagcggaggctagaaggagagagatgggtgcgagagcgtcagtattaagcgggggagaattagatcgcgatgggaaaaaattcggttaaggccagggggaaagaaaaaatataaattaaaacatatagtatgggcaagcagggagctagaacgattcgcagttaatcctggcctgttagaaacatcagaaggctgtagacaaatactgggacagctacaaccatcccttcagacaggatcagaagaacttagatcattatataatacagtagcaaccctctattgtgtgcatcaaaggatagagataaaagacaccaaggaagctttagacaagatagaggaagagcaaaacaaaagtaagaccaccgcacagcaagcggccgctgatcttcagacctggaggaggagatatgagggacaattggagaagtgaattatataaatataaagtagtaaaaattgaaccattaggagtagcacccaccaaggcaaagagaagagtggtgcagagagaaaaaagagcagtgggaataggagctttgttccttgggttcttgggagcagcaggaagcactatgggcgcagcgtcaatgacgctgacggtacaggccagacaattattgtctggtatagtgcagcagcagaacaatttgctgagggctattgaggcgcaacagcatctgttgcaactcacagtctggggcatcaagcagctccaggcaagaatcctggctgtggaaagatacctaaaggatcaacagctcctggggatttggggttgctctggaaaactcatttgcaccactgctgtgccttggaatgctagttggagtaataaatctctggaacagatttggaatcacacgacctggatggagtgggacagagaaattaacaattacacaagcttaatacactccttaattgaagaatcgcaaaaccagcaagaaaagaatgaacaagaattattggaattagataaatgggcaagtttgtggaattggtttaacataacaaattggctgtggtatataaaattattcataatgatagtaggaggcttggtaggtttaagaatagtttttgctgtactttctatagtgaatagagttaggcagggatattcaccattatcgtttcagacccacctcccaaccccgaggggacccttgcgccttttccaaggcagccctgggtttgcgcagggacgcggctgctctgggcgtggttccgggaaacgcagcggcgccgaccctgggtctcgcacattcttcacgtccgttcgcagcgtcacccggatcttcgccgctacccttgtgggccccccggcgacgcttcctgctccgcccctaagtcgggaaggttccttgcggttcgcggcgtgccggacgtgacaaacggaagccgcacgtctcactagtaccctcgcagacggacagcgccagggagcaatggcagcgcgccgaccgcgatgggctgtggccaatagcggctgctcagcagggcgcgccgagagcagcggccgggaaggggcggtgcgggaggcggggtgtggggcggtagtgtgggccctgttcctgcccgcgcggtgttccgcattctgcaagcctccggagcgcacgtcggcagtcggctccctcgttgaccgaatcaccgacctctctccccagggggtacccagctgtctagagaattctagatcttgagacaaatggcagtattcatccacaattttaaaagaaaaggggggattggggggtacagtgcaggggaaagaatagtagacataatagcaacagacatacaaactaaagaattacaaaaacaaattacaaaaattcaaaattttcgggtttattacagggacagcagagatccactttggcgccggctcgaggggg

SEQ ID NO: 131 - protein, 233 aa, Artificial Sequence
  Synthetic Polypeptide
MKKPELTATSVEKFLIEKFDSVSDLMQLSEGEESRAFSFDVGGRGYVLRVNSCADGFYKDRYVYRHFASAALPIPEVLDIGEFSESLTYCISRRAQGVTLQDLPETELPAVLQPVAEAMDAIAAADLSQTSCLSYETEILTVEYGLLPIGKIVEKRIECTVYSVDNNGNIYTQPVAQWHDRGEQEVFEYCLEDGSLIRATKDHKFMTVDGQMLPIDEIFERELDLMRVDNLPN

SEQ ID NO: 132 - DNA, 9393 bp, Artificial Sequence
  Synthetic Polynucleotide
cccggggttattaatagtaatcaattacggggtcattagttcatagcccatatatggagttccgcgttacataacttacggtaaatggcccgcctggctgaccgcccaacgacccccgcccattgacgtcaataatgacgtatgttcccatagtaacgccaatagggactttccattgacgtcaatgggtggagtatttacggtaaactgcccacttggcagtacatcaagtgtatcatatgccaagtacgccccctattgacgtcaatgacggtaaatggcccgcctggcattatgcccagtacatgaccttatgggactttcctacttggcagtacatctacgtattagtcatcgctattaccatggtgatgcggttttggcagtacatcaatgggcgtggatagcggtttgactcacggggatttccaagtctccaccccattgacgtcaatgggagtttgttttggcaccaaaatcaacgggactttccaaaatgtcgtaacaactccgccccattgacgcaaatgggcggtaggcgtgtacggtgggaggtctatataagcagagctctctggctaactgtcgggatcaacaagtttgtacaaaaaagcaggctccgaattcaccggtgccgccaccatgattaagatcgctacgcggaagtacctggggaaacagaacgtctacgacataggtgtggagcgcgatcacaactttgctctgaaaaatggatttatcgccagcaactgcgggttcggcccattcggaccgcaaggaatcggtcaatacactacatggcgtgatttcatatgcgcgattgctgatccccatgtgtatcactggcaaactgtgatggacgacaccgtcagtgcgtccgtcgcgcaggctctcgatgagctgatgctttgggccgaggactgccccgaagtccggcacctcgtgcacgcggatttcggctccaacaatgtcctgacggacaatggccgcataacagcggtcattgactggagcgaggcgatgttcggggattcccaatacgaggtcgccaacatcttcttctggaggccgtggttggcttgtatggagcagcagacgcgctacttcgagcggaggcatccggagcttgcaggatcgccgcggctccgggcgtatatgctccgcattggtcttgaccaactctatcagagcttggttgacggcaatttcgatgatgcagcttgggcgcagggtcgatgcgacgcaatcgtccgatccggagccgggactgtcgggcgtacacaaatcgcccgcagaagcgcggccgtctggaccgatggctgtgtagaagtactcgccgatagtggaaaccgacgccccagcactcgtccgagggcaaaggaatagttaattaagaattcgacccagctttcttgtacaaagtggttggtaagcctatccctaaccctctcctcggtctcgattctacgtagtaatgagctagcagtctcgaggttaacgaattccgccccccccctaacgttactggccgaagccgcttggaataaggccggtgtgcgcttgtctatatgttattttccaccatattgccgtcttttggcaatgtgagggcccggaaacctggccctgtcttcttgacgagcattcctaggggtctttcccctctcgccaaaggaatgcaaggtctgttgaatgtcgtgaaggaagcagttcctctggaagcttcttgaagacaaacaacgtctgtagcgaccctttgcaggcagcggaaccccccacctggcgacaggtgcccctgcggccaaaagccacgtgtataagatacacctgcaaaggcggcacaaccccagtgccacgttgtgagttggatagttgtggaaagagtcaaatggctctcctcaagcgtattcaacaaggggctgaaggatgcccagaaggtaccccattgtatgggatctgatctggggcctcggtgcacatgctttacatgtgtttagtcgaggttaaaaaaacgtctaggccccccgaaccacggggacgtggttttcctttgaaaaacacgataataccatggtgagcaagggcgaggaggataacatggccatcatcaaggagttcatgcgcttcaaggtgcacatggagggctccgtgaacggccacgagttcgagatcgagggcgagggcgagggccgcccctacgagggcacccagaccgccaagctgaaggtgaccaagggtggccccctgcccttcgcctgggacatcctgtcccctcagttcatgtacggctccaaggcctacgtgaagcaccccgccgacatccccgactacttgaagctgtccttccccgagggcttcaagtgggagcgcgtgatgaacttcgaggacggcggcgtggtgaccgtgacccaggactcctccctgcaggacggcgagttcatctacaaggtgaagctgcgcggcaccaacttcccctccgacggccccgtaatgcagaagaagaccatgggctgggaggcctcctccgagcggatgtaccccgaggacggcgccctgaagggcgagatcaagcagaggctgaagctgaaggacggcggccactacgacgctgaggtcaagaccacctacaaggccaagaagcccgtgcagctgcccggcgcctacaacgtcaacatcaagttggacatcacctcccacaacgaggactacaccatcgtggaacagtacgaacgcgccgagggccgccactccaccggcggcatggacgagctgtacaagtaacaccggtggcgcgttaagtcgacaatcaacctctggattacaaaatttgtgaaagattgactggtattcttaactatgttgctccttttacgctatgtggatacgctgctttaatgcctttgtatcatgctattgcttcccgtatggctttcattttctcctccttgtataaatcctggttgctgtctctttatgaggagttgtggcccgttgtcaggcaacgtggcgtggtgtgcactgtgtttgctgacgcaacccccactggttggggcattgccaccacctgtcagctcctttccgggactttcgctttccccctccctattgccacggcggaactcatcgccgcctgccttgcccgctgctggacaggggctcggctgttgggcactgacaattccgtggtgttgtcggggaaatcatcgtcctttccttggctgctcgcctgtgttgccacctggattctgcgcgggacgtccttctgctacgtcccttcggccctcaatccagcggaccttccttcccgcggcctgctgccggctctgcggcctcttccgcgtcttcgccttcgccctcagacgagtcggatctccctttgggccgcctccccgcgtcgactttaagaccaatgacttacaaggcagctgtagatcttagccactttttaaaagaaaaggggggactggaagggctaattcactcccaacgaagacaagatctgctttttgcttgtactgggtctctctggttagaccagatctgagcctgggagctctctggctaactagggaacccactgcttaagcctcaataaagcttgccttgagtgcttcaagtagtgtgtgcccgtctgttgtgtgactctggtaactagagatccctcagacccttttagtcagtgtggaaaatctctagcagtacgtatagtagttcatgtcatcttattattcagtatttataacttgcaaagaaatgaatatcagagagtgagaggaacttgtttattgcagcttataatggttacaaataaagcaatagcatcacaaatttcacaaataaagcatttttttcactgcattctagttgtggtttgtccaaactcatcaatgtatcttatcatgtctggctctagctatcccgcccctaactccgcccatcccgcccctaactccgcccagttccgcccattctccgccccatggctgactaattttttttatttatgcagaggccgaggccgcctcggcctctgagctattccagaagtagtgaggaggcttttttggaggcctagggacgtacccaattcgccctatagtgagtcgtattacgcgcgctcactggccgtcgttttacaacgtcgtgactgggaaaaccctggcgttacccaacttaatcgccttgcagcacatccccctttcgccagctggcgtaatagcgaagaggcccgcaccgatcgcccttcccaacagttgcgcagcctgaatggcgaatgggacgcgccctgtagcggcgcattaagcgcggcgggtgtggtggttacgcgcagcgtgaccgctacacttgccagcgccctagcgcccgctcctttcgctttcttcccttcctttctcgccacgttcgccggctttccccgtcaagctctaaatcgggggctccctttagggttccgatttagtgctttacggcacctcgaccccaaaaaacttgattagggtgatggttcacgtagtgggccatcgccctgatagacggtttttcgccctttgacgttggagtccacgttctttaatagtggactcttgttccaaactggaacaacactcaaccctatctcggtctattcttttgatttataagggattttgccgatttcggcctattggttaaaaaatgagctgatttaacaaaaatttaacgcgaattttaacaaaatattaacgcttacaatttaggtggcacttttcggggaaatgtgcgcggaacccctatttgtttatttttctaaatacattcaaatatgtatccgctcatgagacaataaccctgataaatgcttcaataatattgaaaaaggaagagtatgagtattcaacatttccgtgtcgcccttattcccttttttgcggcattttgccttcctgtttttgctcacccagaaacgctggtgaaagtaaaagatgctgaagatcagttgggtgcacgagtgggttacatcgaactggatctcaacagcggtaagatccttgagagttttcgccccgaagaacgttttccaatgatgagcacttttaaagttctgctatgtggcgcggtattatcccgtattgacgccgggcaagagcaactcggtcgccgcatacactattctcagaatgacttggttgagtactcaccagtcacagaaaagcatcttacggatggcatgacagtaagagaattatgcagtgctgccataaccatgagtgataacactgcggccaacttacttctgacaacgatcggaggaccgaaggagctaaccgcttttttgcacaacatgggggatcatgtaactcgccttgatcgttgggaaccggagctgaatgaagccataccaaacgacgagcgtgacaccacgatgcctgtagcaatggcaacaacgttgcgcaaactattaactggcgaactacttactctagcttcccggcaacaattaatagactggatggaggcggataaagttgcaggaccacttctgcgctcggcccttccggctggctggtttattgctgataaatctggagccggtgagcgtgggtctcgcggtatcattgcagcactggggccagatggtaagccctcccgtatcgtagttatctacacgacggggagtcaggcaactatggatgaacgaaatagacagatcgctgagataggtgcctcactgattaagcattggtaactgtcagaccaagtttactcatatatactttagattgatttaaaacttcatttttaatttaaaaggatctaggtgaagatcctttttgataatctcatgaccaaaatcccttaacgtgagttttcgttccactgagcgtcagaccccgtagaaaagatcaaaggatcttcttgagatcctttttttctgcgcgtaatctgctgcttgcaaacaaaaaaaccaccgctaccagcggtggtttgtttgccggatcaagagctaccaactctttttccgaaggtaactggcttcagcagagcgcagataccaaatactgttcttctagtgtagccgtagttaggccaccacttcaagaactctgtagcaccgcctacatacctcgctctgctaatcctgttaccagtggctgctgccagtggcgataagtcgtgtcttaccgggttggactcaagacgatagttaccggataaggcgcagcggtcgggctgaacggggggttcgtgcacacagcccagcttggagcgaacgacctacaccgaactgagatacctacagcgtgagctatgagaaagcgccacgcttcccgaagggagaaaggcggacaggtatccggtaagcggcagggtcggaacaggagagcgcacgagggagcttccagggggaaacgcctggtatctttatagtcctgtcgggtttcgccacctctgacttgagcgtcgatttttgtgatgctcgtcaggggggcggagcctatggaaaaacgccagcaacgcggcctttttacggttcctggccttttgctggccttttgctcacatgttctttcctgcgttatcccctgattctgtggataaccgtattaccgcctttgagtgagctgataccgctcgccgcagccgaacgaccgagcgcagcgagtcagtgagcgaggaagcggaagagcgcccaatacgcaaaccgcctctccccgcgcgttggccgattcattaatgcagctggcacgacaggtttcccgactggaaagcgggcagtgagcgcaacgcaattaatgtgagttagctcactcattaggcaccccaggctttacactttatgcttccggctcgtatgttgtgtggaattgtgagcggataacaatttcacacaggaaacagctatgaccatgattacgccaagcgcgcaattaaccctcactaaagggaacaaaagctggagctgcaagcttaatgtagtcttatgcaatactcttgtagtcttgcaacatggtaacgatgagttagcaacatgccttacaaggagagaaaaagcaccgtgcatgccgattggtggaagtaaggtggtacgatcgtgccttattaggaaggcaacagacgggtctgacatggattggacgaaccactgaattgccgcattgcagagatattgtatttaagtgcctagctcgatacataaacgggtctctctggttagaccagatctgagcctgggagctctctggctaactagggaacccactgcttaagcctcaataaagcttgccttgagtgcttcaagtagtgtgtgcccgtctgttgtgtgactctggtaactagagatccctcagacccttttagtcagtgtggaaaatctctagcagtggcgcccgaacagggacttgaaagcgaaagggaaaccagaggagctctctcgacgcaggactcggcttgctgaagcgcgcacggcaagaggcgaggggcggcgactggtgagtacgccaaaaattttgactagcggaggctagaaggagagagatgggtgcgagagcgtcagtattaagcgggggagaattagatcgcgatgggaaaaaattcggttaaggccagggggaaagaaaaaatataaattaaaacatatagtatgggcaagcagggagctagaacgattcgcagttaatcctggcctgttagaaacatcagaaggctgtagacaaatactgggacagctacaaccatcccttcagacaggatcagaagaacttagatcattatataatacagtagcaaccctctattgtgtgcatcaaaggatagagataaaagacaccaaggaagctttagacaagatagaggaagagcaaaacaaaagtaagaccaccgcacagcaagcggccgctgatcttcagacctggaggaggagatatgagggacaattggagaagtgaattatataaatataaagtagtaaaaattgaaccattaggagtagcacccaccaaggcaaagagaagagtggtgcagagagaaaaaagagcagtgggaataggagctttgttccttgggttcttgggagcagcaggaagcactatgggcgcagcgtcaatgacgctgacggtacaggccagacaattattgtctggtatagtgcagcagcagaacaatttgctgagggctattgaggcgcaacagcatctgttgcaactcacagtctggggcatcaagcagctccaggcaagaatcctggctgtggaaagatacctaaaggatcaacagctcctggggatttggggttgctctggaaaactcatttgcaccactgctgtgccttggaatgctagttggagtaataaatctctggaacagatttggaatcacacgacctggatggagtgggacagagaaattaacaattacacaagcttaatacactccttaattgaagaatcgcaaaaccagcaagaaaagaatgaacaagaattattggaattagataaatgggcaagtttgtggaattggtttaacataacaaattggctgtggtatataaaattattcataatgatagtaggaggcttggtaggtttaagaatagtttttgctgtactttctatagtgaatagagttaggcagggatattcaccattatcgtttcagacccacctcccaaccccgaggggacccttgcgccttttccaaggcagccctgggtttgcgcagggacgcggctgctctgggcgtggttccgggaaacgcagcggcgccgaccctgggtctcgcacattcttcacgtccgttcgcagcgtcacccggatcttcgccgctacccttgtgggccccccggcgacgcttcctgctccgcccctaagtcgggaaggttccttgcggttcgcggcgtgccggacgtgacaaacggaagccgcacgtctcactagtaccctcgcagacggacagcgccagggagcaatggcagcgcgccgaccgcgatgggctgtggccaatagcggctgctcagcagggcgcgccgagagcagcggccgggaaggggcggtgcgggaggcggggtgtggggcggtagtgtgggccctgttcctgcccgcgcggtgttccgcattctgcaagcctccggagcgcacgtcggcagtcggctccctcgttgaccgaatcaccgacctctctccccagggggtacccagctgtctagagaattctagatcttgagacaaatggcagtattcatccacaattttaaaagaaaaggggggattggggggtacagtgcaggggaaagaatagtagacataatagcaacagacatacaaactaaagaattacaaaaacaaattacaaaaattcaaaattttcgggtttattacagggacagcagagatccactttggcgccggctcgaggggg

SEQ ID NO: 133 - protein, 247 aa, Artificial Sequence
  Synthetic Polypeptide
MIKIATRKYLGKQNVYDIGVERDHNFALKNGFIASNCGFGPFGPQGIGQYTTWRDFICAIADPHVYHWQTVMDDTVSASVAQALDELMLWAEDCPEVRHLVHADFGSNNVLTDNGRITAVIDWSEAMFGDSQYEVANIFFWRPWLACMEQQTRYFERRHPELAGSPRLRAYMLRIGLDQLYQSLVDGNFDDAAWAQGRCDAIVRSGAGTVGRTQIARRSAAVWTDGCVEVLADSGNRRPSTRPRAKE

SEQ ID NO: 134 - DNA, 9465 bp, Artificial Sequence
  Synthetic Polynucleotide
cccggggttattaatagtaatcaattacggggtcattagttcatagcccatatatggagttccgcgttacataacttacggtaaatggcccgcctggctgaccgcccaacgacccccgcccattgacgtcaataatgacgtatgttcccatagtaacgccaatagggactttccattgacgtcaatgggtggagtatttacggtaaactgcccacttggcagtacatcaagtgtatcatatgccaagtacgccccctattgacgtcaatgacggtaaatggcccgcctggcattatgcccagtacatgaccttatgggactttcctacttggcagtacatctacgtattagtcatcgctattaccatggtgatgcggttttggcagtacatcaatgggcgtggatagcggtttgactcacggggatttccaagtctccaccccattgacgtcaatgggagtttgttttggcaccaaaatcaacgggactttccaaaatgtcgtaacaactccgccccattgacgcaaatgggcggtaggcgtgtacggtgggaggtctatataagcagagctctctggctaactgtcgggatcaacaagtttgtacaaaaaagcaggctccgaattcaccggtgccaccatgaaaaagcctgaactcaccgcgacgtctgtcgagaagtttctgatcgaaaagttcgacagcgtctccgacctgatgcagctctcggagggcgaagaatctcgtgctttcagcttcgatgtaggagggcgtggatatgtcctgcgggtaaatagctgcgccgatggtttctacaaagatcgttatgtttatcggcactttgcatcggccgcgctcccgattccggaagtgcttgacattggggaatttagcgagagcctgacctattgcatctcccgccgtgcacagggtgtcacgttgcaagacctgcctgaaaccgaactgcccgctgttctgcagccggtcgcggaggccatggatgcgatcgctgcggccgatcttagccagacgagcgggttcggcccattcggaccgcaaggaatcggtcaatacactacatggcgtgatttcatatgcgcgattgctgatccccatgtgtatcactggcaaactgtgatggacgacaccgtcagttgcctttcatacgagaccgagatcctgactgtcgagtacggattgcttcctatcggcaaaatcgtggagaagaggattgaatgtaccgtctattcagtcgataataatgggaacatctacacacagcccgtggctcaatggcacgacagaggagagcaggaagtttttgaatactgtctcgaggacggatccctcatccgcgctactaaagatcataagtttatgaccgtggacggccagatgctgccaattgacgaaatttttgaacgagagctggatctgatgagagtcgacaaccttccaaactgattaattaagaattcgacccagctttcttgtacaaagtggttggtaagcctatccctaaccctctcctcggtctcgattctacgtagtaatgagctagcagtctcgaggttaacgaattccgccccccccctaacgttactggccgaagccgcttggaataaggccggtgtgcgcttgtctatatgttattttccaccatattgccgtcttttggcaatgtgagggcccggaaacctggccctgtcttcttgacgagcattcctaggggtctttcccctctcgccaaaggaatgcaaggtctgttgaatgtcgtgaaggaagcagttcctctggaagcttcttgaagacaaacaacgtctgtagcgaccctttgcaggcagcggaaccccccacctggcgacaggtgcccctgcggccaaaagccacgtgtataagatacacctgcaaaggcggcacaaccccagtgccacgttgtgagttggatagttgtggaaagagtcaaatggctctcctcaagcgtattcaacaaggggctgaaggatgcccagaaggtaccccattgtatgggatctgatctggggcctcggtgcacatgctttacatgtgtttagtcgaggttaaaaaaacgtctaggccccccgaaccacggggacgtggttttcctttgaaaaacacgataataccatggccatgagcgagctgattaaggagaacatgcacatgaagctgtacatggagggcaccgtggacaaccatcacttcaagtgcacatccgagggcgaaggcaagccctacgagggcacccagaccatgagaatcaaggtggtcgagggcggccctctccccttcgccttcgacatcctggctactagcttcctctacggcagcaagaccttcatcaaccacacccagggcatccccgacttcttcaagcagtccttccctgagggcttcacatgggagagagtcaccacatacgaagacgggggcgtgctgaccgctacccaggacaccagcctccaggacggctgcctcatctacaacgtcaagatcagaggggtgaacttcacatccaacggccctgtgatgcagaagaaaacactcggctgggaggccttcaccgagacgctgtaccccgctgacggcggcctggaaggcagaaacgacatggccctgaagctcgtgggcgggagccatctgatcgcaaacatcaagaccacatatagatccaagaaacccgctaagaacctcaagatgcctggcgtctactatgtggactacagactggaaagaatcaaggaggccaacaacgagacctacgtcgagcagcacgaggtggcagtggccagatactgcgacctccctagcaaactggggcacaagcttaattaacaccggtggcgcgttaagtcgacaatcaacctctggattacaaaatttgtgaaagattgactggtattcttaactatgttgctccttttacgctatgtggatacgctgctttaatgcctttgtatcatgctattgcttcccgtatggctttcattttctcctccttgtataaatcctggttgctgtctctttatgaggagttgtggcccgttgtcaggcaacgtggcgtggtgtgcactgtgtttgctgacgcaacccccactggttggggcattgccaccacctgtcagctcctttccgggactttcgctttccccctccctattgccacggcggaactcatcgccgcctgccttgcccgctgctggacaggggctcggctgttgggcactgacaattccgtggtgttgtcggggaaatcatcgtcctttccttggctgctcgcctgtgttgccacctggattctgcgcgggacgtccttctgctacgtcccttcggccctcaatccagcggaccttccttcccgcggcctgctgccggctctgcggcctcttccgcgtcttcgccttcgccctcagacgagtcggatctccctttgggccgcctccccgcgtcgactttaagaccaatgacttacaaggcagctgtagatcttagccactttttaaaagaaaaggggggactggaagggctaattcactcccaacgaagacaagatctgctttttgcttgtactgggtctctctggttagaccagatctgagcctgggagctctctggctaactagggaacccactgcttaagcctcaataaagcttgccttgagtgcttcaagtagtgtgtgcccgtctgttgtgtgactctggtaactagagatccctcagacccttttagtcagtgtggaaaatctctagcagtacgtatagtagttcatgtcatcttattattcagtatttataacttgcaaagaaatgaatatcagagagtgagaggaacttgtttattgcagcttataatggttacaaataaagcaatagcatcacaaatttcacaaataaagcatttttttcactgcattctagttgtggtttgtccaaactcatcaatgtatcttatcatgtctggctctagctatcccgcccctaactccgcccatcccgcccctaactccgcccagttccgcccattctccgccccatggctgactaattttttttatttatgcagaggccgaggccgcctcggcctctgagctattccagaagtagtgaggaggcttttttggaggcctagggacgtacccaattcgccctatagtgagtcgtattacgcgcgctcactggccgtcgttttacaacgtcgtgactgggaaaaccctggcgttacccaacttaatcgccttgcagcacatccccctttcgccagctggcgtaatagcgaagaggcccgcaccgatcgcccttcccaacagttgcgcagcctgaatggcgaatgggacgcgccctgtagcggcgcattaagcgcggcgggtgtggtggttacgcgcagcgtgaccgctacacttgccagcgccctagcgcccgctcctttcgctttcttcccttcctttctcgccacgttcgccggctttccccgtcaagctctaaatcgggggctccctttagggttccgatttagtgctttacggcacctcgaccccaaaaaacttgattagggtgatggttcacgtagtgggccatcgccctgatagacggtttttcgccctttgacgttggagtccacgttctttaatagtggactcttgttccaaactggaacaacactcaaccctatctcggtctattcttttgatttataagggattttgccgatttcggcctattggttaaaaaatgagctgatttaacaaaaatttaacgcgaattttaacaaaatattaacgcttacaatttaggtggcacttttcggggaaatgtgcgcggaacccctatttgtttatttttctaaatacattcaaatatgtatccgctcatgagacaataaccctgataaatgcttcaataatattgaaaaaggaagagtatgagtattcaacatttccgtgtcgcccttattcccttttttgcggcattttgccttcctgtttttgctcacccagaaacgctggtgaaagtaaaagatgctgaagatcagttgggtgcacgagtgggttacatcgaactggatctcaacagcggtaagatccttgagagttttcgccccgaagaacgttttccaatgatgagcacttttaaagttctgctatgtggcgcggtattatcccgtattgacgccgggcaagagcaactcggtcgccgcatacactattctcagaatgacttggttgagtactcaccagtcacagaaaagcatcttacggatggcatgacagtaagagaattatgcagtgctgccataaccatgagtgataacactgcggccaacttacttctgacaacgatcggaggaccgaaggagctaaccgcttttttgcacaacatgggggatcatgtaactcgccttgatcgttgggaaccggagctgaatgaagccataccaaacgacgagcgtgacaccacgatgcctgtagcaatggcaacaacgttgcgcaaactattaactggcgaactacttactctagcttcccggcaacaattaatagactggatggaggcggataaagttgcaggaccacttctgcgctcggcccttccggctggctggtttattgctgataaatctggagccggtgagcgtgggtctcgcggtatcattgcagcactggggccagatggtaagccctcccgtatcgtagttatctacacgacggggagtcaggcaactatggatgaacgaaatagacagatcgctgagataggtgcctcactgattaagcattggtaactgtcagaccaagtttactcatatatactttagattgatttaaaacttcatttttaatttaaaaggatctaggtgaagatcctttttgataatctcatgaccaaaatcccttaacgtgagttttcgttccactgagcgtcagaccccgtagaaaagatcaaaggatcttcttgagatcctttttttctgcgcgtaatctgctgcttgcaaacaaaaaaaccaccgctaccagcggtggtttgtttgccggatcaagagctaccaactctttttccgaaggtaactggcttcagcagagcgcagataccaaatactgttcttctagtgtagccgtagttaggccaccacttcaagaactctgtagcaccgcctacatacctcgctctgctaatcctgttaccagtggctgctgccagtggcgataagtcgtgtcttaccgggttggactcaagacgatagttaccggataaggcgcagcggtcgggctgaacggggggttcgtgcacacagcccagcttggagcgaacgacctacaccgaactgagatacctacagcgtgagctatgagaaagcgccacgcttcccgaagggagaaaggcggacaggtatccggtaagcggcagggtcggaacaggagagcgcacgagggagcttccagggggaaacgcctggtatctttatagtcctgtcgggtttcgccacctctgacttgagcgtcgatttttgtgatgctcgtcaggggggcggagcctatggaaaaacgccagcaacgcggcctttttacggttcctggccttttgctggccttttgctcacatgttctttcctgcgttatcccctgattctgtggataaccgtattaccgcctttgagtgagctgataccgctcgccgcagccgaacgaccgagcgcagcgagtcagtgagcgaggaagcggaagagcgcccaatacgcaaaccgcctctccccgcgcgttggccgattcattaatgcagctggcacgacaggtttcccgactggaaagcgggcagtgagcgcaacgcaattaatgtgagttagctcactcattaggcaccccaggctttacactttatgcttccggctcgtatgttgtgtggaattgtgagcggataacaatttcacacaggaaacagctatgaccatgattacgccaagcgcgcaattaaccctcactaaagggaacaaaagctggagctgcaagcttaatgtagtcttatgcaatactcttgtagtcttgcaacatggtaacgatgagttagcaacatgccttacaaggagagaaaaagcaccgtgcatgccgattggtggaagtaaggtggtacgatcgtgccttattaggaaggcaacagacgggtctgacatggattggacgaaccactgaattgccgcattgcagagatattgtatttaagtgcctagctcgatacataaacgggtctctctggttagaccagatctgagcctgggagctctctggctaactagggaacccactgcttaagcctcaataaagcttgccttgagtgcttcaagtagtgtgtgcccgtctgttgtgtgactctggtaactagagatccctcagacccttttagtcagtgtggaaaatctctagcagtggcgcccgaacagggacttgaaagcgaaagggaaaccagaggagctctctcgacgcaggactcggcttgctgaagcgcgcacggcaagaggcgaggggcggcgactggtgagtacgccaaaaattttgactagcggaggctagaaggagagagatgggtgcgagagcgtcagtattaagcgggggagaattagatcgcgatgggaaaaaattcggttaaggccagggggaaagaaaaaatataaattaaaacatatagtatgggcaagcagggagctagaacgattcgcagttaatcctggcctgttagaaacatcagaaggctgtagacaaatactgggacagctacaaccatcccttcagacaggatcagaagaacttagatcattatataatacagtagcaaccctctattgtgtgcatcaaaggatagagataaaagacaccaaggaagctttagacaagatagaggaagagcaaaacaaaagtaagaccaccgcacagcaagcggccgctgatcttcagacctggaggaggagatatgagggacaattggagaagtgaattatataaatataaagtagtaaaaattgaaccattaggagtagcacccaccaaggcaaagagaagagtggtgcagagagaaaaaagagcagtgggaataggagctttgttccttgggttcttgggagcagcaggaagcactatgggcgcagcgtcaatgacgctgacggtacaggccagacaattattgtctggtatagtgcagcagcagaacaatttgctgagggctattgaggcgcaacagcatctgttgcaactcacagtctggggcatcaagcagctccaggcaagaatcctggctgtggaaagatacctaaaggatcaacagctcctggggatttggggttgctctggaaaactcatttgcaccactgctgtgccttggaatgctagttggagtaataaatctctggaacagatttggaatcacacgacctggatggagtgggacagagaaattaacaattacacaagcttaatacactccttaattgaagaatcgcaaaaccagcaagaaaagaatgaacaagaattattggaattagataaatgggcaagtttgtggaattggtttaacataacaaattggctgtggtatataaaattattcataatgatagtaggaggcttggtaggtttaagaatagtttttgctgtactttctatagtgaatagagttaggcagggatattcaccattatcgtttcagacccacctcccaaccccgaggggacccttgcgccttttccaaggcagccctgggtttgcgcagggacgcggctgctctgggcgtggttccgggaaacgcagcggcgccgaccctgggtctcgcacattcttcacgtccgttcgcagcgtcacccggatcttcgccgctacccttgtgggccccccggcgacgcttcctgctccgcccctaagtcgggaaggttccttgcggttcgcggcgtgccggacgtgacaaacggaagccgcacgtctcactagtaccctcgcagacggacagcgccagggagcaatggcagcgcgccgaccgcgatgggctgtggccaatagcggctgctcagcagggcgcgccgagagcagcggccgggaaggggcggtgcgggaggcggggtgtggggcggtagtgtgggccctgttcctgcccgcgcggtgttccgcattctgcaagcctccggagcgcacgtcggcagtcggctccctcgttgaccgaatcaccgacctctctccccagggggtacccagctgtctagagaattctagatcttgagacaaatggcagtattcatccacaattttaaaagaaaaggggggattggggggtacagtgcaggggaaagaatagtagacataatagcaacagacatacaaactaaagaattacaaaaacaaattacaaaaattcaaaattttcgggtttattacagggacagcagagatccactttggcgccggctcgaggggg

SEQ ID NO: 135 - protein, 273 aa, Artificial Sequence
  Synthetic Polypeptide
MKKPELTATSVEKFLIEKFDSVSDLMQLSEGEESRAFSFDVGGRGYVLRVNSCADGFYKDRYVYRHFASAALPIPEVLDIGEFSESLTYCISRRAQGVTLQDLPETELPAVLQPVAEAMDAIAAADLSQTSGFGPFGPQGIGQYTTWRDFICAIADPHVYHWQTVMDDTVSCLSYETEILTVEYGLLPIGKIVEKRIECTVYSVDNNGNIYTQPVAQWHDRGEQEVFEYCLEDGSLIRATKDHKFMTVDGQMLPIDEIFERELDLMRVDNLPN

SEQ ID NO: 136 - DNA, 9273 bp, Artificial Sequence
  Synthetic Polynucleotide
cccggggttattaatagtaatcaattacggggtcattagttcatagcccatatatggagttccgcgttacataacttacggtaaatggcccgcctggctgaccgcccaacgacccccgcccattgacgtcaataatgacgtatgttcccatagtaacgccaatagggactttccattgacgtcaatgggtggagtatttacggtaaactgcccacttggcagtacatcaagtgtatcatatgccaagtacgccccctattgacgtcaatgacggtaaatggcccgcctggcattatgcccagtacatgaccttatgggactttcctacttggcagtacatctacgtattagtcatcgctattaccatggtgatgcggttttggcagtacatcaatgggcgtggatagcggtttgactcacggggatttccaagtctccaccccattgacgtcaatgggagtttgttttggcaccaaaatcaacgggactttccaaaatgtcgtaacaactccgccccattgacgcaaatgggcggtaggcgtgtacggtgggaggtctatataagcagagctctctggctaactgtcgggatcaacaagtttgtacaaaaaagcaggctccgaattcaccggtgccgccaccatgattaagatcgctacgcggaagtacctggggaaacagaacgtctacgacataggtgtggagcgcgatcacaactttgctctgaaaaatggatttatcgccagcaactgcgcgtccgtcgcgcaggctctcgatgagctgatgctttgggccgaggactgccccgaagtccggcacctcgtgcacgcggatttcggctccaacaatgtcctgacggacaatggccgcataacagcggtcattgactggagcgaggcgatgttcggggattcccaatacgaggtcgccaacatcttcttctggaggccgtggttggcttgtatggagcagcagacgcgctacttcgagcggaggcatccggagcttgcaggatcgccgcggctccgggcgtatatgctccgcattggtcttgaccaactctatcagagcttggttgacggcaatttcgatgatgcagcttgggcgcagggtcgatgcgacgcaatcgtccgatccggagccgggactgtcgggcgtacacaaatcgcccgcagaagcgcggccgtctggaccgatggctgtgtagaagtactcgccgatagtggaaaccgacgccccagcactcgtccgagggcaaaggaatagttaattaagaattcgacccagctttcttgtacaaagtggttggtaagcctatccctaaccctctcctcggtctcgattctacgtagtaatgagctagcagtctcgaggttaacgaattccgccccccccctaacgttactggccgaagccgcttggaataaggccggtgtgcgcttgtctatatgttattttccaccatattgccgtcttttggcaatgtgagggcccggaaacctggccctgtcttcttgacgagcattcctaggggtctttcccctctcgccaaaggaatgcaaggtctgttgaatgtcgtgaaggaagcagttcctctggaagcttcttgaagacaaacaacgtctgtagcgaccctttgcaggcagcggaaccccccacctggcgacaggtgcccctgcggccaaaagccacgtgtataagatacacctgcaaaggcggcacaaccccagtgccacgttgtgagttggatagttgtggaaagagtcaaatggctctcctcaagcgtattcaacaaggggctgaaggatgcccagaaggtaccccattgtatgggatctgatctggggcctcggtgcacatgctttacatgtgtttagtcgaggttaaaaaaacgtctaggccccccgaaccacggggacgtggttttcctttgaaaaacacgataataccatggtgagcaagggcgaggaggataacatggccatcatcaaggagttcatgcgcttcaaggtgcacatggagggctccgtgaacggccacgagttcgagatcgagggcgagggcgagggccgcccctacgagggcacccagaccgccaagctgaaggtgaccaagggtggccccctgcccttcgcctgggacatcctgtcccctcagttcatgtacggctccaaggcctacgtgaagcaccccgccgacatccccgactacttgaagctgtccttccccgagggcttcaagtgggagcgcgtgatgaacttcgaggacggcggcgtggtgaccgtgacccaggactcctccctgcaggacggcgagttcatctacaaggtgaagctgcgcggcaccaacttcccctccgacggccccgtaatgcagaagaagaccatgggctgggaggcctcctccgagcggatgtaccccgaggacggcgccctgaagggcgagatcaagcagaggctgaagctgaaggacggcggccactacgacgctgaggtcaagaccacctacaaggccaagaagcccgtgcagctgcccggcgcctacaacgtcaacatcaagttggacatcacctcccacaacgaggactacaccatcgtggaacagtacgaacgcgccgagggccgccactccaccggcggcatggacgagctgtacaagtaacaccggtggcgcgttaagtcgacaatcaacctctggattacaaaatttgtgaaagattgactggtattcttaactatgttgctccttttacgctatgtggatacgctgctttaatgcctttgtatcatgctattgcttcccgtatggctttcattttctcctccttgtataaatcctggttgctgtctctttatgaggagttgtggcccgttgtcaggcaacgtggcgtggtgtgcactgtgtttgctgacgcaacccccactggttggggcattgccaccacctgtcagctcctttccgggactttcgctttccccctccctattgccacggcggaactcatcgccgcctgccttgcccgctgctggacaggggctcggctgttgggcactgacaattccgtggtgttgtcggggaaatcatcgtcctttccttggctgctcgcctgtgttgccacctggattctgcgcgggacgtccttctgctacgtcccttcggccctcaatccagcggaccttccttcccgcggcctgctgccggctctgcggcctcttccgcgtcttcgccttcgccctcagacgagtcggatctccctttgggccgcctccccgcgtcgactttaagaccaatgacttacaaggcagctgtagatcttagccactttttaaaagaaaaggggggactggaagggctaattcactcccaacgaagacaagatctgctttttgcttgtactgggtctctctggttagaccagatctgagcctgggagctctctggctaactagggaacccactgcttaagcctcaataaagcttgccttgagtgcttcaagtagtgtgtgcccgtctgttgtgtgactctggtaactagagatccctcagacccttttagtcagtgtggaaaatctctagcagtacgtatagtagttcatgtcatcttattattcagtatttataacttgcaaagaaatgaatatcagagagtgagaggaacttgtttattgcagcttataatggttacaaataaagcaatagcatcacaaatttcacaaataaagcatttttttcactgcattctagttgtggtttgtccaaactcatcaatgtatcttatcatgtctggctctagctatcccgcccctaactccgcccatcccgcccctaactccgcccagttccgcccattctccgccccatggctgactaattttttttatttatgcagaggccgaggccgcctcggcctctgagctattccagaagtagtgaggaggcttttttggaggcctagggacgtacccaattcgccctatagtgagtcgtattacgcgcgctcactggccgtcgttttacaacgtcgtgactgggaaaaccctggcgttacccaacttaatcgccttgcagcacatccccctttcgccagctggcgtaatagcgaagaggcccgcaccgatcgcccttcccaacagttgcgcagcctgaatggcgaatgggacgcgccctgtagcggcgcattaagcgcggcgggtgtggtggttacgcgcagcgtgaccgctacacttgccagcgccctagcgcccgctcctttcgctttcttcccttcctttctcgccacgttcgccggctttccccgtcaagctctaaatcgggggctccctttagggttccgatttagtgctttacggcacctcgaccccaaaaaacttgattagggtgatggttcacgtagtgggccatcgccctgatagacggtttttcgccctttgacgttggagtccacgttctttaatagtggactcttgttccaaactggaacaacactcaaccctatctcggtctattcttttgatttataagggattttgccgatttcggcctattggttaaaaaatgagctgatttaacaaaaatttaacgcgaattttaacaaaatattaacgcttacaatttaggtggcacttttcggggaaatgtgcgcggaacccctatttgtttatttttctaaatacattcaaatatgtatccgctcatgagacaataaccctgataaatgcttcaataatattgaaaaaggaagagtatgagtattcaacatttccgtgtcgcccttattcccttttttgcggcattttgccttcctgtttttgctcacccagaaacgctggtgaaagtaaaagatgctgaagatcagttgggtgcacgagtgggttacatcgaactggatctcaacagcggtaagatccttgagagttttcgccccgaagaacgttttccaatgatgagcacttttaaagttctgctatgtggcgcggtattatcccgtattgacgccgggcaagagcaactcggtcgccgcatacactattctcagaatgacttggttgagtactcaccagtcacagaaaagcatcttacggatggcatgacagtaagagaattatgcagtgctgccataaccatgagtgataacactgcggccaacttacttctgacaacgatcggaggaccgaaggagctaaccgcttttttgcacaacatgggggatcatgtaactcgccttgatcgttgggaaccggagctgaatgaagccataccaaacgacgagcgtgacaccacgatgcctgtagcaatggcaacaacgttgcgcaaactattaactggcgaactacttactctagcttcccggcaacaattaatagactggatggaggcggataaagttgcaggaccacttctgcgctcggcccttccggctggctggtttattgctgataaatctggagccggtgagcgtgggtctcgcggtatcattgcagcactggggccagatggtaagccctcccgtatcgtagttatctacacgacggggagtcaggcaactatggatgaacgaaatagacagatcgctgagataggtgcctcactgattaagcattggtaactgtcagaccaagtttactcatatatactttagattgatttaaaacttcatttttaatttaaaaggatctaggtgaagatcctttttgataatctcatgaccaaaatcccttaacgtgagttttcgttccactgagcgtcagaccccgtagaaaagatcaaaggatcttcttgagatcctttttttctgcgcgtaatctgctgcttgcaaacaaaaaaaccaccgctaccagcggtggtttgtttgccggatcaagagctaccaactctttttccgaaggtaactggcttcagcagagcgcagataccaaatactgttcttctagtgtagccgtagttaggccaccacttcaagaactctgtagcaccgcctacatacctcgctctgctaatcctgttaccagtggctgctgccagtggcgataagtcgtgtcttaccgggttggactcaagacgatagttaccggataaggcgcagcggtcgggctgaacggggggttcgtgcacacagcccagcttggagcgaacgacctacaccgaactgagatacctacagcgtgagctatgagaaagcgccacgcttcccgaagggagaaaggcggacaggtatccggtaagcggcagggtcggaacaggagagcgcacgagggagcttccagggggaaacgcctggtatctttatagtcctgtcgggtttcgccacctctgacttgagcgtcgatttttgtgatgctcgtcaggggggcggagcctatggaaaaacgccagcaacgcggcctttttacggttcctggccttttgctggccttttgctcacatgttctttcctgcgttatcccctgattctgtggataaccgtattaccgcctttgagtgagctgataccgctcgccgcagccgaacgaccgagcgcagcgagtcagtgagcgaggaagcggaagagcgcccaatacgcaaaccgcctctccccgcgcgttggccgattcattaatgcagctggcacgacaggtttcccgactggaaagcgggcagtgagcgcaacgcaattaatgtgagttagctcactcattaggcaccccaggctttacactttatgcttccggctcgtatgttgtgtggaattgtgagcggataacaatttcacacaggaaacagctatgaccatgattacgccaagcgcgcaattaaccctcactaaagggaacaaaagctggagctgcaagcttaatgtagtcttatgcaatactcttgtagtcttgcaacatggtaacgatgagttagcaacatgccttacaaggagagaaaaagcaccgtgcatgccgattggtggaagtaaggtggtacgatcgtgccttattaggaaggcaacagacgggtctgacatggattggacgaaccactgaattgccgcattgcagagatattgtatttaagtgcctagctcgatacataaacgggtctctctggttagaccagatctgagcctgggagctctctggctaactagggaacccactgcttaagcctcaataaagcttgccttgagtgcttcaagtagtgtgtgcccgtctgttgtgtgactctggtaactagagatccctcagacccttttagtcagtgtggaaaatctctagcagtggcgcccgaacagggacttgaaagcgaaagggaaaccagaggagctctctcgacgcaggactcggcttgctgaagcgcgcacggcaagaggcgaggggcggcgactggtgagtacgccaaaaattttgactagcggaggctagaaggagagagatgggtgcgagagcgtcagtattaagcgggggagaattagatcgcgatgggaaaaaattcggttaaggccagggggaaagaaaaaatataaattaaaacatatagtatgggcaagcagggagctagaacgattcgcagttaatcctggcctgttagaaacatcagaaggctgtagacaaatactgggacagctacaaccatcccttcagacaggatcagaagaacttagatcattatataatacagtagcaaccctctattgtgtgcatcaaaggatagagataaaagacaccaaggaagctttagacaagatagaggaagagcaaaacaaaagtaagaccaccgcacagcaagcggccgctgatcttcagacctggaggaggagatatgagggacaattggagaagtgaattatataaatataaagtagtaaaaattgaaccattaggagtagcacccaccaaggcaaagagaagagtggtgcagagagaaaaaagagcagtgggaataggagctttgttccttgggttcttgggagcagcaggaagcactatgggcgcagcgtcaatgacgctgacggtacaggccagacaattattgtctggtatagtgcagcagcagaacaatttgctgagggctattgaggcgcaacagcatctgttgcaactcacagtctggggcatcaagcagctccaggcaagaatcctggctgtggaaagatacctaaaggatcaacagctcctggggatttggggttgctctggaaaactcatttgcaccactgctgtgccttggaatgctagttggagtaataaatctctggaacagatttggaatcacacgacctggatggagtgggacagagaaattaacaattacacaagcttaatacactccttaattgaagaatcgcaaaaccagcaagaaaagaatgaacaagaattattggaattagataaatgggcaagtttgtggaattggtttaacataacaaattggctgtggtatataaaattattcataatgatagtaggaggcttggtaggtttaagaatagtttttgctgtactttctatagtgaatagagttaggcagggatattcaccattatcgtttcagacccacctcccaaccccgaggggacccttgcgccttttccaaggcagccctgggtttgcgcagggacgcggctgctctgggcgtggttccgggaaacgcagcggcgccgaccctgggtctcgcacattcttcacgtccgttcgcagcgtcacccggatcttcgccgctacccttgtgggccccccggcgacgcttcctgctccgcccctaagtcgggaaggttccttgcggttcgcggcgtgccggacgtgacaaacggaagccgcacgtctcactagtaccctcgcagacggacagcgccagggagcaatggcagcgcgccgaccgcgatgggctgtggccaatagcggctgctcagcagggcgcgccgagagcagcggccgggaaggggcggtgcgggaggcggggtgtggggcggtagtgtgggccctgttcctgcccgcgcggtgttccgcattctgcaagcctccggagcgcacgtcggcagtcggctccctcgttgaccgaatcaccgacctctctccccagggggtacccagctgtctagagaattctagatcttgagacaaatggcagtattcatccacaattttaaaagaaaaggggggattggggggtacagtgcaggggaaagaatagtagacataatagcaacagacatacaaactaaagaattacaaaaacaaattacaaaaattcaaaattttcgggtttattacagggacagcagagatccactttggcgccggctcgaggggg

SEQ ID NO: 137 - protein, 207 aa, Artificial Sequence
  Synthetic Polypeptide
MIKIATRKYLGKQNVYDIGVERDHNFALKNGFIASNCASVAQALDELMLWAEDCPEVRHLVHADFGSNNVLTDNGRITAVIDWSEAMFGDSQYEVANIFFWRPWLACMEQQTRYFERRHPELAGSPRLRAYMLRIGLDQLYQSLVDGNFDDAAWAQGRCDAIVRSGAGTVGRTQIARRSAAVWTDGCVEVLADSGNRRPSTRPRAKE

SEQ ID NO: 138 - DNA, 9606 bp, Artificial Sequence
  Synthetic Polynucleotide
cccggggttattaatagtaatcaattacggggtcattagttcatagcccatatatggagttccgcgttacataacttacggtaaatggcccgcctggctgaccgcccaacgacccccgcccattgacgtcaataatgacgtatgttcccatagtaacgccaatagggactttccattgacgtcaatgggtggagtatttacggtaaactgcccacttggcagtacatcaagtgtatcatatgccaagtacgccccctattgacgtcaatgacggtaaatggcccgcctggcattatgcccagtacatgaccttatgggactttcctacttggcagtacatctacgtattagtcatcgctattaccatggtgatgcggttttggcagtacatcaatgggcgtggatagcggtttgactcacggggatttccaagtctccaccccattgacgtcaatgggagtttgttttggcaccaaaatcaacgggactttccaaaatgtcgtaacaactccgccccattgacgcaaatgggcggtaggcgtgtacggtgggaggtctatataagcagagctctctggctaactgtcgggatcaacaagtttgtacaaaaaagcaggctccgaattcaccggtgccaccatgaaaaagcctgaactcaccgcgacgtctgtcgagaagtttctgatcgaaaagttcgacagcgtctccgacctgatgcagctctcggagggcgaagaatctcgtgctttcagcttcgatgtaggagggcgtggatatgtcctgcgggtaaatagctgcgccgatggtttctacaaagatcgttatgtttatcggcactttgcatcggccgcgctcccgattccggaagtgcttgacattggggaatttagcgagagcctgacctattgcatctcccgccgtgcacagggtgtcacgttgcaagacctgcctgaaaccgaactgcccgctgttctgcagccggtcgcggaggccatggatgcgatcgctgcggccgatcttagccagacgagcgggttcggcccattcggaccgcaaggaatcggtcaatacactacatggcgtgatttcatatgcgcgattgctgatccccatgtgtatcactggcaaactgtgatggacgacaccgtcagtgcgtccgtcgcgcaggctctcgatgagctgatgctttgggccgaggactgccccgaagtccggcacctcgtgcacgcggatttcggctccaacaatgtcctgacggacaatggccgcataacagcggtcattgactggagctgcctttcatacgagaccgagatcctgactgtcgagtacggattgcttcctatcggcaaaatcgtggagaagaggattgaatgtaccgtctattcagtcgataataatgggaacatctacacacagcccgtggctcaatggcacgacagaggagagcaggaagtttttgaatactgtctcgaggacggatccctcatccgcgctactaaagatcataagtttatgaccgtggacggccagatgctgccaattgacgaaatttttgaacgagagctggatctgatgagagtcgacaaccttccaaactgattaattaagaattcgacccagctttcttgtacaaagtggttggtaagcctatccctaaccctctcctcggtctcgattctacgtagtaatgagctagcagtctcgaggttaacgaattccgccccccccctaacgttactggccgaagccgcttggaataaggccggtgtgcgcttgtctatatgttattttccaccatattgccgtcttttggcaatgtgagggcccggaaacctggccctgtcttcttgacgagcattcctaggggtctttcccctctcgccaaaggaatgcaaggtctgttgaatgtcgtgaaggaagcagttcctctggaagcttcttgaagacaaacaacgtctgtagcgaccctttgcaggcagcggaaccccccacctggcgacaggtgcccctgcggccaaaagccacgtgtataagatacacctgcaaaggcggcacaaccccagtgccacgttgtgagttggatagttgtggaaagagtcaaatggctctcctcaagcgtattcaacaaggggctgaaggatgcccagaaggtaccccattgtatgggatctgatctggggcctcggtgcacatgctttacatgtgtttagtcgaggttaaaaaaacgtctaggccccccgaaccacggggacgtggttttcctttgaaaaacacgataataccatggccatgagcgagctgattaaggagaacatgcacatgaagctgtacatggagggcaccgtggacaaccatcacttcaagtgcacatccgagggcgaaggcaagccctacgagggcacccagaccatgagaatcaaggtggtcgagggcggccctctccccttcgccttcgacatcctggctactagcttcctctacggcagcaagaccttcatcaaccacacccagggcatccccgacttcttcaagcagtccttccctgagggcttcacatgggagagagtcaccacatacgaagacgggggcgtgctgaccgctacccaggacaccagcctccaggacggctgcctcatctacaacgtcaagatcagaggggtgaacttcacatccaacggccctgtgatgcagaagaaaacactcggctgggaggccttcaccgagacgctgtaccccgctgacggcggcctggaaggcagaaacgacatggccctgaagctcgtgggcgggagccatctgatcgcaaacatcaagaccacatatagatccaagaaacccgctaagaacctcaagatgcctggcgtctactatgtggactacagactggaaagaatcaaggaggccaacaacgagacctacgtcgagcagcacgaggtggcagtggccagatactgcgacctccctagcaaactggggcacaagcttaattaacaccggtggcgcgttaagtcgacaatcaacctctggattacaaaatttgtgaaagattgactggtattcttaactatgttgctccttttacgctatgtggatacgctgctttaatgcctttgtatcatgctattgcttcccgtatggctttcattttctcctccttgtataaatcctggttgctgtctctttatgaggagttgtggcccgttgtcaggcaacgtggcgtggtgtgcactgtgtttgctgacgcaacccccactggttggggcattgccaccacctgtcagctcctttccgggactttcgctttccccctccctattgccacggcggaactcatcgccgcctgccttgcccgctgctggacaggggctcggctgttgggcactgacaattccgtggtgttgtcggggaaatcatcgtcctttccttggctgctcgcctgtgttgccacctggattctgcgcgggacgtccttctgctacgtcccttcggccctcaatccagcggaccttccttcccgcggcctgctgccggctctgcggcctcttccgcgtcttcgccttcgccctcagacgagtcggatctccctttgggccgcctccccgcgtcgactttaagaccaatgacttacaaggcagctgtagatcttagccactttttaaaagaaaaggggggactggaagggctaattcactcccaacgaagacaagatctgctttttgcttgtactgggtctctctggttagaccagatctgagcctgggagctctctggctaactagggaacccactgcttaagcctcaataaagcttgccttgagtgcttcaagtagtgtgtgcccgtctgttgtgtgactctggtaactagagatccctcagacccttttagtcagtgtggaaaatctctagcagtacgtatagtagttcatgtcatcttattattcagtatttataacttgcaaagaaatgaatatcagagagtgagaggaacttgtttattgcagcttataatggttacaaataaagcaatagcatcacaaatttcacaaataaagcatttttttcactgcattctagttgtggtttgtccaaactcatcaatgtatcttatcatgtctggctctagctatcccgcccctaactccgcccatcccgcccctaactccgcccagttccgcccattctccgccccatggctgactaattttttttatttatgcagaggccgaggccgcctcggcctctgagctattccagaagtagtgaggaggcttttttggaggcctagggacgtacccaattcgccctatagtgagtcgtattacgcgcgctcactggccgtcgttttacaacgtcgtgactgggaaaaccctggcgttacccaacttaatcgccttgcagcacatccccctttcgccagctggcgtaatagcgaagaggcccgcaccgatcgcccttcccaacagttgcgcagcctgaatggcgaatgggacgcgccctgtagcggcgcattaagcgcggcgggtgtggtggttacgcgcagcgtgaccgctacacttgccagcgccctagcgcccgctcctttcgctttcttcccttcctttctcgccacgttcgccggctttccccgtcaagctctaaatcgggggctccctttagggttccgatttagtgctttacggcacctcgaccccaaaaaacttgattagggtgatggttcacgtagtgggccatcgccctgatagacggtttttcgccctttgacgttggagtccacgttctttaatagtggactcttgttccaaactggaacaacactcaaccctatctcggtctattcttttgatttataagggattttgccgatttcggcctattggttaaaaaatgagctgatttaacaaaaatttaacgcgaattttaacaaaatattaacgcttacaatttaggtggcacttttcggggaaatgtgcgcggaacccctatttgtttatttttctaaatacattcaaatatgtatccgctcatgagacaataaccctgataaatgcttcaataatattgaaaaaggaagagtatgagtattcaacatttccgtgtcgcccttattcccttttttgcggcattttgccttcctgtttttgctcacccagaaacgctggtgaaagtaaaagatgctgaagatcagttgggtgcacgagtgggttacatcgaactggatctcaacagcggtaagatccttgagagttttcgccccgaagaacgttttccaatgatgagcacttttaaagttctgctatgtggcgcggtattatcccgtattgacgccgggcaagagcaactcggtcgccgcatacactattctcagaatgacttggttgagtactcaccagtcacagaaaagcatcttacggatggcatgacagtaagagaattatgcagtgctgccataaccatgagtgataacactgcggccaacttacttctgacaacgatcggaggaccgaaggagctaaccgcttttttgcacaacatgggggatcatgtaactcgccttgatcgttgggaaccggagctgaatgaagccataccaaacgacgagcgtgacaccacgatgcctgtagcaatggcaacaacgttgcgcaaactattaactggcgaactacttactctagcttcccggcaacaattaatagactggatggaggcggataaagttgcaggaccacttctgcgctcggcccttccggctggctggtttattgctgataaatctggagccggtgagcgtgggtctcgcggtatcattgcagcactggggccagatggtaagccctcccgtatcgtagttatctacacgacggggagtcaggcaactatggatgaacgaaatagacagatcgctgagataggtgcctcactgattaagcattggtaactgtcagaccaagtttactcatatatactttagattgatttaaaacttcatttttaatttaaaaggatctaggtgaagatcctttttgataatctcatgaccaaaatcccttaacgtgagttttcgttccactgagcgtcagaccccgtagaaaagatcaaaggatcttcttgagatcctttttttctgcgcgtaatctgctgcttgcaaacaaaaaaaccaccgctaccagcggtggtttgtttgccggatcaagagctaccaactctttttccgaaggtaactggcttcagcagagcgcagataccaaatactgttcttctagtgtagccgtagttaggccaccacttcaagaactctgtagcaccgcctacatacctcgctctgctaatcctgttaccagtggctgctgccagtggcgataagtcgtgtcttaccgggttggactcaagacgatagttaccggataaggcgcagcggtcgggctgaacggggggttcgtgcacacagcccagcttggagcgaacgacctacaccgaactgagatacctacagcgtgagctatgagaaagcgccacgcttcccgaagggagaaaggcggacaggtatccggtaagcggcagggtcggaacaggagagcgcacgagggagcttccagggggaaacgcctggtatctttatagtcctgtcgggtttcgccacctctgacttgagcgtcgatttttgtgatgctcgtcaggggggcggagcctatggaaaaacgccagcaacgcggcctttttacggttcctggccttttgctggccttttgctcacatgttctttcctgcgttatcccctgattctgtggataaccgtattaccgcctttgagtgagctgataccgctcgccgcagccgaacgaccgagcgcagcgagtcagtgagcgaggaagcggaagagcgcccaatacgcaaaccgcctctccccgcgcgttggccgattcattaatgcagctggcacgacaggtttcccgactggaaagcgggcagtgagcgcaacgcaattaatgtgagttagctcactcattaggcaccccaggctttacactttatgcttccggctcgtatgttgtgtggaattgtgagcggataacaatttcacacaggaaacagctatgaccatgattacgccaagcgcgcaattaaccctcactaaagggaacaaaagctggagctgcaagcttaatgtagtcttatgcaatactcttgtagtcttgcaacatggtaacgatgagttagcaacatgccttacaaggagagaaaaagcaccgtgcatgccgattggtggaagtaaggtggtacgatcgtgccttattaggaaggcaacagacgggtctgacatggattggacgaaccactgaattgccgcattgcagagatattgtatttaagtgcctagctcgatacataaacgggtctctctggttagaccagatctgagcctgggagctctctggctaactagggaacccactgcttaagcctcaataaagcttgccttgagtgcttcaagtagtgtgtgcccgtctgttgtgtgactctggtaactagagatccctcagacccttttagtcagtgtggaaaatctctagcagtggcgcccgaacagggacttgaaagcgaaagggaaaccagaggagctctctcgacgcaggactcggcttgctgaagcgcgcacggcaagaggcgaggggcggcgactggtgagtacgccaaaaattttgactagcggaggctagaaggagagagatgggtgcgagagcgtcagtattaagcgggggagaattagatcgcgatgggaaaaaattcggttaaggccagggggaaagaaaaaatataaattaaaacatatagtatgggcaagcagggagctagaacgattcgcagttaatcctggcctgttagaaacatcagaaggctgtagacaaatactgggacagctacaaccatcccttcagacaggatcagaagaacttagatcattatataatacagtagcaaccctctattgtgtgcatcaaaggatagagataaaagacaccaaggaagctttagacaagatagaggaagagcaaaacaaaagtaagaccaccgcacagcaagcggccgctgatcttcagacctggaggaggagatatgagggacaattggagaagtgaattatataaatataaagtagtaaaaattgaaccattaggagtagcacccaccaaggcaaagagaagagtggtgcagagagaaaaaagagcagtgggaataggagctttgttccttgggttcttgggagcagcaggaagcactatgggcgcagcgtcaatgacgctgacggtacaggccagacaattattgtctggtatagtgcagcagcagaacaatttgctgagggctattgaggcgcaacagcatctgttgcaactcacagtctggggcatcaagcagctccaggcaagaatcctggctgtggaaagatacctaaaggatcaacagctcctggggatttggggttgctctggaaaactcatttgcaccactgctgtgccttggaatgctagttggagtaataaatctctggaacagatttggaatcacacgacctggatggagtgggacagagaaattaacaattacacaagcttaatacactccttaattgaagaatcgcaaaaccagcaagaaaagaatgaacaagaattattggaattagataaatgggcaagtttgtggaattggtttaacataacaaattggctgtggtatataaaattattcataatgatagtaggaggcttggtaggtttaagaatagtttttgctgtactttctatagtgaatagagttaggcagggatattcaccattatcgtttcagacccacctcccaaccccgaggggacccttgcgccttttccaaggcagccctgggtttgcgcagggacgcggctgctctgggcgtggttccgggaaacgcagcggcgccgaccctgggtctcgcacattcttcacgtccgttcgcagcgtcacccggatcttcgccgctacccttgtgggccccccggcgacgcttcctgctccgcccctaagtcgggaaggttccttgcggttcgcggcgtgccggacgtgacaaacggaagccgcacgtctcactagtaccctcgcagacggacagcgccagggagcaatggcagcgcgccgaccgcgatgggctgtggccaatagcggctgctcagcagggcgcgccgagagcagcggccgggaaggggcggtgcgggaggcggggtgtggggcggtagtgtgggccctgttcctgcccgcgcggtgttccgcattctgcaagcctccggagcgcacgtcggcagtcggctccctcgttgaccgaatcaccgacctctctccccagggggtacccagctgtctagagaattctagatcttgagacaaatggcagtattcatccacaattttaaaagaaaaggggggattggggggtacagtgcaggggaaagaatagtagacataatagcaacagacatacaaactaaagaattacaaaaacaaattacaaaaattcaaaattttcgggtttattacagggacagcagagatccactttggcgccggctcgaggggg

SEQ ID NO: 139 - protein, 320 aa, Artificial Sequence
  Synthetic Polypeptide
MKKPELTATSVEKFLIEKFDSVSDLMQLSEGEESRAFSFDVGGRGYVLRVNSCADGFYKDRYVYRHFASAALPIPEVLDIGEFSESLTYCISRRAQGVTLQDLPETELPAVLQPVAEAMDAIAAADLSQTSGFGPFGPQGIGQYTTWRDFICAIADPHVYHWQTVMDDTVSASVAQALDELMLWAEDCPEVRHLVHADFGSNNVLTDNGRITAVIDWSCLSYETEILTVEYGLLPIGKIVEKRIECTVYSVDNNGNIYTQPVAQWHDRGEQEVFEYCLEDGSLIRATKDHKFMTVDGQMLPIDEIFERELDLMRVDNLPN

SEQ ID NO: 140 - DNA, 9132 bp, Artificial Sequence
  Synthetic Polynucleotide
cccggggttattaatagtaatcaattacggggtcattagttcatagcccatatatggagttccgcgttacataacttacggtaaatggcccgcctggctgaccgcccaacgacccccgcccattgacgtcaataatgacgtatgttcccatagtaacgccaatagggactttccattgacgtcaatgggtggagtatttacggtaaactgcccacttggcagtacatcaagtgtatcatatgccaagtacgccccctattgacgtcaatgacggtaaatggcccgcctggcattatgcccagtacatgaccttatgggactttcctacttggcagtacatctacgtattagtcatcgctattaccatggtgatgcggttttggcagtacatcaatgggcgtggatagcggtttgactcacggggatttccaagtctccaccccattgacgtcaatgggagtttgttttggcaccaaaatcaacgggactttccaaaatgtcgtaacaactccgccccattgacgcaaatgggcggtaggcgtgtacggtgggaggtctatataagcagagctctctggctaactgtcgggatcaacaagtttgtacaaaaaagcaggctccgaattcaccggtgccgccaccatgattaagatcgctacgcggaagtacctggggaaacagaacgtctacgacataggtgtggagcgcgatcacaactttgctctgaaaaatggatttatcgccagcaactgcgaggcgatgttcggggattcccaatacgaggtcgccaacatcttcttctggaggccgtggttggcttgtatggagcagcagacgcgctacttcgagcggaggcatccggagcttgcaggatcgccgcggctccgggcgtatatgctccgcattggtcttgaccaactctatcagagcttggttgacggcaatttcgatgatgcagcttgggcgcagggtcgatgcgacgcaatcgtccgatccggagccgggactgtcgggcgtacacaaatcgcccgcagaagcgcggccgtctggaccgatggctgtgtagaagtactcgccgatagtggaaaccgacgccccagcactcgtccgagggcaaaggaatagttaattaagaattcgacccagctttcttgtacaaagtggttggtaagcctatccctaaccctctcctcggtctcgattctacgtagtaatgagctagcagtctcgaggttaacgaattccgccccccccctaacgttactggccgaagccgcttggaataaggccggtgtgcgcttgtctatatgttattttccaccatattgccgtcttttggcaatgtgagggcccggaaacctggccctgtcttcttgacgagcattcctaggggtctttcccctctcgccaaaggaatgcaaggtctgttgaatgtcgtgaaggaagcagttcctctggaagcttcttgaagacaaacaacgtctgtagcgaccctttgcaggcagcggaaccccccacctggcgacaggtgcccctgcggccaaaagccacgtgtataagatacacctgcaaaggcggcacaaccccagtgccacgttgtgagttggatagttgtggaaagagtcaaatggctctcctcaagcgtattcaacaaggggctgaaggatgcccagaaggtaccccattgtatgggatctgatctggggcctcggtgcacatgctttacatgtgtttagtcgaggttaaaaaaacgtctaggccccccgaaccacggggacgtggttttcctttgaaaaacacgataataccatggtgagcaagggcgaggaggataacatggccatcatcaaggagttcatgcgcttcaaggtgcacatggagggctccgtgaacggccacgagttcgagatcgagggcgagggcgagggccgcccctacgagggcacccagaccgccaagctgaaggtgaccaagggtggccccctgcccttcgcctgggacatcctgtcccctcagttcatgtacggctccaaggcctacgtgaagcaccccgccgacatccccgactacttgaagctgtccttccccgagggcttcaagtgggagcgcgtgatgaacttcgaggacggcggcgtggtgaccgtgacccaggactcctccctgcaggacggcgagttcatctacaaggtgaagctgcgcggcaccaacttcccctccgacggccccgtaatgcagaagaagaccatgggctgggaggcctcctccgagcggatgtaccccgaggacggcgccctgaagggcgagatcaagcagaggctgaagctgaaggacggcggccactacgacgctgaggtcaagaccacctacaaggccaagaagcccgtgcagctgcccggcgcctacaacgtcaacatcaagttggacatcacctcccacaacgaggactacaccatcgtggaacagtacgaacgcgccgagggccgccactccaccggcggcatggacgagctgtacaagtaacaccggtggcgcgttaagtcgacaatcaacctctggattacaaaatttgtgaaagattgactggtattcttaactatgttgctccttttacgctatgtggatacgctgctttaatgcctttgtatcatgctattgcttcccgtatggctttcattttctcctccttgtataaatcctggttgctgtctctttatgaggagttgtggcccgttgtcaggcaacgtggcgtggtgtgcactgtgtttgctgacgcaacccccactggttggggcattgccaccacctgtcagctcctttccgggactttcgctttccccctccctattgccacggcggaactcatcgccgcctgccttgcccgctgctggacaggggctcggctgttgggcactgacaattccgtggtgttgtcggggaaatcatcgtcctttccttggctgctcgcctgtgttgccacctggattctgcgcgggacgtccttctgctacgtcccttcggccctcaatccagcggaccttccttcccgcggcctgctgccggctctgcggcctcttccgcgtcttcgccttcgccctcagacgagtcggatctccctttgggccgcctccccgcgtcgactttaagaccaatgacttacaaggcagctgtagatcttagccactttttaaaagaaaaggggggactggaagggctaattcactcccaacgaagacaagatctgctttttgcttgtactgggtctctctggttagaccagatctgagcctgggagctctctggctaactagggaacccactgcttaagcctcaataaagcttgccttgagtgcttcaagtagtgtgtgcccgtctgttgtgtgactctggtaactagagatccctcagacccttttagtcagtgtggaaaatctctagcagtacgtatagtagttcatgtcatcttattattcagtatttataacttgcaaagaaatgaatatcagagagtgagaggaacttgtttattgcagcttataatggttacaaataaagcaatagcatcacaaatttcacaaataaagcatttttttcactgcattctagttgtggtttgtccaaactcatcaatgtatcttatcatgtctggctctagctatcccgcccctaactccgcccatcccgcccctaactccgcccagttccgcccattctccgccccatggctgactaattttttttatttatgcagaggccgaggccgcctcggcctctgagctattccagaagtagtgaggaggcttttttggaggcctagggacgtacccaattcgccctatagtgagtcgtattacgcgcgctcactggccgtcgttttacaacgtcgtgactgggaaaaccctggcgttacccaacttaatcgccttgcagcacatccccctttcgccagctggcgtaatagcgaagaggcccgcaccgatcgcccttcccaacagttgcgcagcctgaatggcgaatgggacgcgccctgtagcggcgcattaagcgcggcgggtgtggtggttacgcgcagcgtgaccgctacacttgccagcgccctagcgcccgctcctttcgctttcttcccttcctttctcgccacgttcgccggctttccccgtcaagctctaaatcgggggctccctttagggttccgatttagtgctttacggcacctcgaccccaaaaaacttgattagggtgatggttcacgtagtgggccatcgccctgatagacggtttttcgccctttgacgttggagtccacgttctttaatagtggactcttgttccaaactggaacaacactcaaccctatctcggtctattcttttgatttataagggattttgccgatttcggcctattggttaaaaaatgagctgatttaacaaaaatttaacgcgaattttaacaaaatattaacgcttacaatttaggtggcacttttcggggaaatgtgcgcggaacccctatttgtttatttttctaaatacattcaaatatgtatccgctcatgagacaataaccctgataaatgcttcaataatattgaaaaaggaagagtatgagtattcaacatttccgtgtcgcccttattcccttttttgcggcattttgccttcctgtttttgctcacccagaaacgctggtgaaagtaaaagatgctgaagatcagttgggtgcacgagtgggttacatcgaactggatctcaacagcggtaagatccttgagagttttcgccccgaagaacgttttccaatgatgagcacttttaaagttctgctatgtggcgcggtattatcccgtattgacgccgggcaagagcaactcggtcgccgcatacactattctcagaatgacttggttgagtactcaccagtcacagaaaagcatcttacggatggcatgacagtaagagaattatgcagtgctgccataaccatgagtgataacactgcggccaacttacttctgacaacgatcggaggaccgaaggagctaaccgcttttttgcacaacatgggggatcatgtaactcgccttgatcgttgggaaccggagctgaatgaagccataccaaacgacgagcgtgacaccacgatgcctgtagcaatggcaacaacgttgcgcaaactattaactggcgaactacttactctagcttcccggcaacaattaatagactggatggaggcggataaagttgcaggaccacttctgcgctcggcccttccggctggctggtttattgctgataaatctggagccggtgagcgtgggtctcgcggtatcattgcagcactggggccagatggtaagccctcccgtatcgtagttatctacacgacggggagtcaggcaactatggatgaacgaaatagacagatcgctgagataggtgcctcactgattaagcattggtaactgtcagaccaagtttactcatatatactttagattgatttaaaacttcatttttaatttaaaaggatctaggtgaagatcctttttgataatctcatgaccaaaatcccttaacgtgagttttcgttccactgagcgtcagaccccgtagaaaagatcaaaggatcttcttgagatcctttttttctgcgcgtaatctgctgcttgcaaacaaaaaaaccaccgctaccagcggtggtttgtttgccggatcaagagctaccaactctttttccgaaggtaactggcttcagcagagcgcagataccaaatactgttcttctagtgtagccgtagttaggccaccacttcaagaactctgtagcaccgcctacatacctcgctctgctaatcctgttaccagtggctgctgccagtggcgataagtcgtgtcttaccgggttggactcaagacgatagttaccggataaggcgcagcggtcgggctgaacggggggttcgtgcacacagcccagcttggagcgaacgacctacaccgaactgagatacctacagcgtgagctatgagaaagcgccacgcttcccgaagggagaaaggcggacaggtatccggtaagcggcagggtcggaacaggagagcgcacgagggagcttccagggggaaacgcctggtatctttatagtcctgtcgggtttcgccacctctgacttgagcgtcgatttttgtgatgctcgtcaggggggcggagcctatggaaaaacgccagcaacgcggcctttttacggttcctggccttttgctggccttttgctcacatgttctttcctgcgttatcccctgattctgtggataaccgtattaccgcctttgagtgagctgataccgctcgccgcagccgaacgaccgagcgcagcgagtcagtgagcgaggaagcggaagagcgcccaatacgcaaaccgcctctccccgcgcgttggccgattcattaatgcagctggcacgacaggtttcccgactggaaagcgggcagtgagcgcaacgcaattaatgtgagttagctcactcattaggcaccccaggctttacactttatgcttccggctcgtatgttgtgtggaattgtgagcggataacaatttcacacaggaaacagctatgaccatgattacgccaagcgcgcaattaaccctcactaaagggaacaaaagctggagctgcaagcttaatgtagtcttatgcaatactcttgtagtcttgcaacatggtaacgatgagttagcaacatgccttacaaggagagaaaaagcaccgtgcatgccgattggtggaagtaaggtggtacgatcgtgccttattaggaaggcaacagacgggtctgacatggattggacgaaccactgaattgccgcattgcagagatattgtatttaagtgcctagctcgatacataaacgggtctctctggttagaccagatctgagcctgggagctctctggctaactagggaacccactgcttaagcctcaataaagcttgccttgagtgcttcaagtagtgtgtgcccgtctgttgtgtgactctggtaactagagatccctcagacccttttagtcagtgtggaaaatctctagcagtggcgcccgaacagggacttgaaagcgaaagggaaaccagaggagctctctcgacgcaggactcggcttgctgaagcgcgcacggcaagaggcgaggggcggcgactggtgagtacgccaaaaattttgactagcggaggctagaaggagagagatgggtgcgagagcgtcagtattaagcgggggagaattagatcgcgatgggaaaaaattcggttaaggccagggggaaagaaaaaatataaattaaaacatatagtatgggcaagcagggagctagaacgattcgcagttaatcctggcctgttagaaacatcagaaggctgtagacaaatactgggacagctacaaccatcccttcagacaggatcagaagaacttagatcattatataatacagtagcaaccctctattgtgtgcatcaaaggatagagataaaagacaccaaggaagctttagacaagatagaggaagagcaaaacaaaagtaagaccaccgcacagcaagcggccgctgatcttcagacctggaggaggagatatgagggacaattggagaagtgaattatataaatataaagtagtaaaaattgaaccattaggagtagcacccaccaaggcaaagagaagagtggtgcagagagaaaaaagagcagtgggaataggagctttgttccttgggttcttgggagcagcaggaagcactatgggcgcagcgtcaatgacgctgacggtacaggccagacaattattgtctggtatagtgcagcagcagaacaatttgctgagggctattgaggcgcaacagcatctgttgcaactcacagtctggggcatcaagcagctccaggcaagaatcctggctgtggaaagatacctaaaggatcaacagctcctggggatttggggttgctctggaaaactcatttgcaccactgctgtgccttggaatgctagttggagtaataaatctctggaacagatttggaatcacacgacctggatggagtgggacagagaaattaacaattacacaagcttaatacactccttaattgaagaatcgcaaaaccagcaagaaaagaatgaacaagaattattggaattagataaatgggcaagtttgtggaattggtttaacataacaaattggctgtggtatataaaattattcataatgatagtaggaggcttggtaggtttaagaatagtttttgctgtactttctatagtgaatagagttaggcagggatattcaccattatcgtttcagacccacctcccaaccccgaggggacccttgcgccttttccaaggcagccctgggtttgcgcagggacgcggctgctctgggcgtggttccgggaaacgcagcggcgccgaccctgggtctcgcacattcttcacgtccgttcgcagcgtcacccggatcttcgccgctacccttgtgggccccccggcgacgcttcctgctccgcccctaagtcgggaaggttccttgcggttcgcggcgtgccggacgtgacaaacggaagccgcacgtctcactagtaccctcgcagacggacagcgccagggagcaatggcagcgcgccgaccgcgatgggctgtggccaatagcggctgctcagcagggcgcgccgagagcagcggccgggaaggggcggtgcgggaggcggggtgtggggcggtagtgtgggccctgttcctgcccgcgcggtgttccgcattctgcaagcctccggagcgcacgtcggcagtcggctccctcgttgaccgaatcaccgacctctctccccagggggtacccagctgtctagagaattctagatcttgagacaaatggcagtattcatccacaattttaaaagaaaaggggggattggggggtacagtgcaggggaaagaatagtagacataatagcaacagacatacaaactaaagaattacaaaaacaaattacaaaaattcaaaattttcgggtttattacagggacagcagagatccactttggcgccggctcgaggggg

SEQ ID NO: 141 - protein, 160 aa, Artificial Sequence
  Synthetic Polypeptide
MIKIATRKYLGKQNVYDIGVERDHNFALKNGFIASNCEAMFGDSQYEVANIFFWRPWLACMEQQTRYFERRHPELAGSPRLRAYMLRIGLDQLYQSLVDGNFDDAAWAQGRCDAIVRSGAGTVGRTQIARRSAAVWTDGCVEVLADSGNRRPSTRPRAKE

SEQ ID NO: 142 - DNA, 9729 bp, Artificial Sequence
  Synthetic Polynucleotide
cccggggttattaatagtaatcaattacggggtcattagttcatagcccatatatggagttccgcgttacataacttacggtaaatggcccgcctggctgaccgcccaacgacccccgcccattgacgtcaataatgacgtatgttcccatagtaacgccaatagggactttccattgacgtcaatgggtggagtatttacggtaaactgcccacttggcagtacatcaagtgtatcatatgccaagtacgccccctattgacgtcaatgacggtaaatggcccgcctggcattatgcccagtacatgaccttatgggactttcctacttggcagtacatctacgtattagtcatcgctattaccatggtgatgcggttttggcagtacatcaatgggcgtggatagcggtttgactcacggggatttccaagtctccaccccattgacgtcaatgggagtttgttttggcaccaaaatcaacgggactttccaaaatgtcgtaacaactccgccccattgacgcaaatgggcggtaggcgtgtacggtgggaggtctatataagcagagctctctggctaactgtcgggatcaacaagtttgtacaaaaaagcaggctccgaattcaccggtgccaccatgaaaaagcctgaactcaccgcgacgtctgtcgagaagtttctgatcgaaaagttcgacagcgtctccgacctgatgcagctctcggagggcgaagaatctcgtgctttcagcttcgatgtaggagggcgtggatatgtcctgcgggtaaatagctgcgccgatggtttctacaaagatcgttatgtttatcggcactttgcatcggccgcgctcccgattccggaagtgcttgacattggggaatttagcgagagcctgacctattgcatctcccgccgtgcacagggtgtcacgttgcaagacctgcctgaaaccgaactgcccgctgttctgcagccggtcgcggaggccatggatgcgatcgctgcggccgatcttagccagacgagcgggttcggcccattcggaccgcaaggaatcggtcaatacactacatggcgtgatttcatatgcgcgattgctgatccccatgtgtatcactggcaaactgtgatggacgacaccgtcagtgcgtccgtcgcgcaggctctcgatgagctgatgctttgggccgaggactgccccgaagtccggcacctcgtgcacgcggatttcggctccaacaatgtcctgacggacaatggccgcataacagcggtcattgactggagcgaggcgatgttcggggattcccaatacgaggtcgccaacatcttcttctggaggccgtggttggcttgtatggagcagcagacgcgctacttcgagcggaggcatccggagcttgcaggatcgtgcctttcatacgagaccgagatcctgactgtcgagtacggattgcttcctatcggcaaaatcgtggagaagaggattgaatgtaccgtctattcagtcgataataatgggaacatctacacacagcccgtggctcaatggcacgacagaggagagcaggaagtttttgaatactgtctcgaggacggatccctcatccgcgctactaaagatcataagtttatgaccgtggacggccagatgctgccaattgacgaaatttttgaacgagagctggatctgatgagagtcgacaaccttccaaactgattaattaagaattcgacccagctttcttgtacaaagtggttggtaagcctatccctaaccctctcctcggtctcgattctacgtagtaatgagctagcagtctcgaggttaacgaattccgccccccccctaacgttactggccgaagccgcttggaataaggccggtgtgcgcttgtctatatgttattttccaccatattgccgtcttttggcaatgtgagggcccggaaacctggccctgtcttcttgacgagcattcctaggggtctttcccctctcgccaaaggaatgcaaggtctgttgaatgtcgtgaaggaagcagttcctctggaagcttcttgaagacaaacaacgtctgtagcgaccctttgcaggcagcggaaccccccacctggcgacaggtgcccctgcggccaaaagccacgtgtataagatacacctgcaaaggcggcacaaccccagtgccacgttgtgagttggatagttgtggaaagagtcaaatggctctcctcaagcgtattcaacaaggggctgaaggatgcccagaaggtaccccattgtatgggatctgatctggggcctcggtgcacatgctttacatgtgtttagtcgaggttaaaaaaacgtctaggccccccgaaccacggggacgtggttttcctttgaaaaacacgataataccatggccatgagcgagctgattaaggagaacatgcacatgaagctgtacatggagggcaccgtggacaaccatcacttcaagtgcacatccgagggcgaaggcaagccctacgagggcacccagaccatgagaatcaaggtggtcgagggcggccctctccccttcgccttcgacatcctggctactagcttcctctacggcagcaagaccttcatcaaccacacccagggcatccccgacttcttcaagcagtccttccctgagggcttcacatgggagagagtcaccacatacgaagacgggggcgtgctgaccgctacccaggacaccagcctccaggacggctgcctcatctacaacgtcaagatcagaggggtgaacttcacatccaacggccctgtgatgcagaagaaaacactcggctgggaggccttcaccgagacgctgtaccccgctgacggcggcctggaaggcagaaacgacatggccctgaagctcgtgggcgggagccatctgatcgcaaacatcaagaccacatatagatccaagaaacccgctaagaacctcaagatgcctggcgtctactatgtggactacagactggaaagaatcaaggaggccaacaacgagacctacgtcgagcagcacgaggtggcagtggccagatactgcgacctccctagcaaactggggcacaagcttaattaacaccggtggcgcgttaagtcgacaatcaacctctggattacaaaatttgtgaaagattgactggtattcttaactatgttgctccttttacgctatgtggatacgctgctttaatgcctttgtatcatgctattgcttcccgtatggctttcattttctcctccttgtataaatcctggttgctgtctctttatgaggagttgtggcccgttgtcaggcaacgtggcgtggtgtgcactgtgtttgctgacgcaacccccactggttggggcattgccaccacctgtcagctcctttccgggactttcgctttccccctccctattgccacggcggaactcatcgccgcctgccttgcccgctgctggacaggggctcggctgttgggcactgacaattccgtggtgttgtcggggaaatcatcgtcctttccttggctgctcgcctgtgttgccacctggattctgcgcgggacgtccttctgctacgtcccttcggccctcaatccagcggaccttccttcccgcggcctgctgccggctctgcggcctcttccgcgtcttcgccttcgccctcagacgagtcggatctccctttgggccgcctccccgcgtcgactttaagaccaatgacttacaaggcagctgtagatcttagccactttttaaaagaaaaggggggactggaagggctaattcactcccaacgaagacaagatctgctttttgcttgtactgggtctctctggttagaccagatctgagcctgggagctctctggctaactagggaacccactgcttaagcctcaataaagcttgccttgagtgcttcaagtagtgtgtgcccgtctgttgtgtgactctggtaactagagatccctcagacccttttagtcagtgtggaaaatctctagcagtacgtatagtagttcatgtcatcttattattcagtatttataacttgcaaagaaatgaatatcagagagtgagaggaacttgtttattgcagcttataatggttacaaataaagcaatagcatcacaaatttcacaaataaagcatttttttcactgcattctagttgtggtttgtccaaactcatcaatgtatcttatcatgtctggctctagctatcccgcccctaactccgcccatcccgcccctaactccgcccagttccgcccattctccgccccatggctgactaattttttttatttatgcagaggccgaggccgcctcggcctctgagctattccagaagtagtgaggaggcttttttggaggcctagggacgtacccaattcgccctatagtgagtcgtattacgcgcgctcactggccgtcgttttacaacgtcgtgactgggaaaaccctggcgttacccaacttaatcgccttgcagcacatccccctttcgccagctggcgtaatagcgaagaggcccgcaccgatcgcccttcccaacagttgcgcagcctgaatggcgaatgggacgcgccctgtagcggcgcattaagcgcggcgggtgtggtggttacgcgcagcgtgaccgctacacttgccagcgccctagcgcccgctcctttcgctttcttcccttcctttctcgccacgttcgccggctttccccgtcaagctctaaatcgggggctccctttagggttccgatttagtgctttacggcacctcgaccccaaaaaacttgattagggtgatggttcacgtagtgggccatcgccctgatagacggtttttcgccctttgacgttggagtccacgttctttaatagtggactcttgttccaaactggaacaacactcaaccctatctcggtctattcttttgatttataagggattttgccgatttcggcctattggttaaaaaatgagctgatttaacaaaaatttaacgcgaattttaacaaaatattaacgcttacaatttaggtggcacttttcggggaaatgtgcgcggaacccctatttgtttatttttctaaatacattcaaatatgtatccgctcatgagacaataaccctgataaatgcttcaataatattgaaaaaggaagagtatgagtattcaacatttccgtgtcgcccttattcccttttttgcggcattttgccttcctgtttttgctcacccagaaacgctggtgaaagtaaaagatgctgaagatcagttgggtgcacgagtgggttacatcgaactggatctcaacagcggtaagatccttgagagttttcgccccgaagaacgttttccaatgatgagcacttttaaagttctgctatgtggcgcggtattatcccgtattgacgccgggcaagagcaactcggtcgccgcatacactattctcagaatgacttggttgagtactcaccagtcacagaaaagcatcttacggatggcatgacagtaagagaattatgcagtgctgccataaccatgagtgataacactgcggccaacttacttctgacaacgatcggaggaccgaaggagctaaccgcttttttgcacaacatgggggatcatgtaactcgccttgatcgttgggaaccggagctgaatgaagccataccaaacgacgagcgtgacaccacgatgcctgtagcaatggcaacaacgttgcgcaaactattaactggcgaactacttactctagcttcccggcaacaattaatagactggatggaggcggataaagttgcaggaccacttctgcgctcggcccttccggctggctggtttattgctgataaatctggagccggtgagcgtgggtctcgcggtatcattgcagcactggggccagatggtaagccctcccgtatcgtagttatctacacgacggggagtcaggcaactatggatgaacgaaatagacagatcgctgagataggtgcctcactgattaagcattggtaactgtcagaccaagtttactcatatatactttagattgatttaaaacttcatttttaatttaaaaggatctaggtgaagatcctttttgataatctcatgaccaaaatcccttaacgtgagttttcgttccactgagcgtcagaccccgtagaaaagatcaaaggatcttcttgagatcctttttttctgcgcgtaatctgctgcttgcaaacaaaaaaaccaccgctaccagcggtggtttgtttgccggatcaagagctaccaactctttttccgaaggtaactggcttcagcagagcgcagataccaaatactgttcttctagtgtagccgtagttaggccaccacttcaagaactctgtagcaccgcctacatacctcgctctgctaatcctgttaccagtggctgctgccagtggcgataagtcgtgtcttaccgggttggactcaagacgatagttaccggataaggcgcagcggtcgggctgaacggggggttcgtgcacacagcccagcttggagcgaacgacctacaccgaactgagatacctacagcgtgagctatgagaaagcgccacgcttcccgaagggagaaaggcggacaggtatccggtaagcggcagggtcggaacaggagagcgcacgagggagcttccagggggaaacgcctggtatctttatagtcctgtcgggtttcgccacctctgacttgagcgtcgatttttgtgatgctcgtcaggggggcggagcctatggaaaaacgccagcaacgcggcctttttacggttcctggccttttgctggccttttgctcacatgttctttcctgcgttatcccctgattctgtggataaccgtattaccgcctttgagtgagctgataccgctcgccgcagccgaacgaccgagcgcagcgagtcagtgagcgaggaagcggaagagcgcccaatacgcaaaccgcctctccccgcgcgttggccgattcattaatgcagctggcacgacaggtttcccgactggaaagcgggcagtgagcgcaacgcaattaatgtgagttagctcactcattaggcaccccaggctttacactttatgcttccggctcgtatgttgtgtggaattgtgagcggataacaatttcacacaggaaacagctatgaccatgattacgccaagcgcgcaattaaccctcactaaagggaacaaaagctggagctgcaagcttaatgtagtcttatgcaatactcttgtagtcttgcaacatggtaacgatgagttagcaacatgccttacaaggagagaaaaagcaccgtgcatgccgattggtggaagtaaggtggtacgatcgtgccttattaggaaggcaacagacgggtctgacatggattggacgaaccactgaattgccgcattgcagagatattgtatttaagtgcctagctcgatacataaacgggtctctctggttagaccagatctgagcctgggagctctctggctaactagggaacccactgcttaagcctcaataaagcttgccttgagtgcttcaagtagtgtgtgcccgtctgttgtgtgactctggtaactagagatccctcagacccttttagtcagtgtggaaaatctctagcagtggcgcccgaacagggacttgaaagcgaaagggaaaccagaggagctctctcgacgcaggactcggcttgctgaagcgcgcacggcaagaggcgaggggcggcgactggtgagtacgccaaaaattttgactagcggaggctagaaggagagagatgggtgcgagagcgtcagtattaagcgggggagaattagatcgcgatgggaaaaaattcggttaaggccagggggaaagaaaaaatataaattaaaacatatagtatgggcaagcagggagctagaacgattcgcagttaatcctggcctgttagaaacatcagaaggctgtagacaaatactgggacagctacaaccatcccttcagacaggatcagaagaacttagatcattatataatacagtagcaaccctctattgtgtgcatcaaaggatagagataaaagacaccaaggaagctttagacaagatagaggaagagcaaaacaaaagtaagaccaccgcacagcaagcggccgctgatcttcagacctggaggaggagatatgagggacaattggagaagtgaattatataaatataaagtagtaaaaattgaaccattaggagtagcacccaccaaggcaaagagaagagtggtgcagagagaaaaaagagcagtgggaataggagctttgttccttgggttcttgggagcagcaggaagcactatgggcgcagcgtcaatgacgctgacggtacaggccagacaattattgtctggtatagtgcagcagcagaacaatttgctgagggctattgaggcgcaacagcatctgttgcaactcacagtctggggcatcaagcagctccaggcaagaatcctggctgtggaaagatacctaaaggatcaacagctcctggggatttggggttgctctggaaaactcatttgcaccactgctgtgccttggaatgctagttggagtaataaatctctggaacagatttggaatcacacgacctggatggagtgggacagagaaattaacaattacacaagcttaatacactccttaattgaagaatcgcaaaaccagcaagaaaagaatgaacaagaattattggaattagataaatgggcaagtttgtggaattggtttaacataacaaattggctgtggtatataaaattattcataatgatagtaggaggcttggtaggtttaagaatagtttttgctgtactttctatagtgaatagagttaggcagggatattcaccattatcgtttcagacccacctcccaaccccgaggggacccttgcgccttttccaaggcagccctgggtttgcgcagggacgcggctgctctgggcgtggttccgggaaacgcagcggcgccgaccctgggtctcgcacattcttcacgtccgttcgcagcgtcacccggatcttcgccgctacccttgtgggccccccggcgacgcttcctgctccgcccctaagtcgggaaggttccttgcggttcgcggcgtgccggacgtgacaaacggaagccgcacgtctcactagtaccctcgcagacggacagcgccagggagcaatggcagcgcgccgaccgcgatgggctgtggccaatagcggctgctcagcagggcgcgccgagagcagcggccgggaaggggcggtgcgggaggcggggtgtggggcggtagtgtgggccctgttcctgcccgcgcggtgttccgcattctgcaagcctccggagcgcacgtcggcagtcggctccctcgttgaccgaatcaccgacctctctccccagggggtacccagctgtctagagaattctagatcttgagacaaatggcagtattcatccacaattttaaaagaaaaggggggattggggggtacagtgcaggggaaagaatagtagacataatagcaacagacatacaaactaaagaattacaaaaacaaattacaaaaattcaaaattttcgggtttattacagggacagcagagatccactttggcgccggctcgaggggg

SEQ ID NO: 143 - protein, 361 aa, Artificial Sequence
  Synthetic Polypeptide
MKKPELTATSVEKFLIEKFDSVSDLMQLSEGEESRAFSFDVGGRGYVLRVNSCADGFYKDRYVYRHFASAALPIPEVLDIGEFSESLTYCISRRAQGVTLQDLPETELPAVLQPVAEAMDAIAAADLSQTSGFGPFGPQGIGQYTTWRDFICAIADPHVYHWQTVMDDTVSASVAQALDELMLWAEDCPEVRHLVHADFGSNNVLTDNGRITAVIDWSEAMFGDSQYEVANIFFWRPWLACMEQQTRYFERRHPELAGSCLSYETEILTVEYGLLPIGKIVEKRIECTVYSVDNNGNIYTQPVAQWHDRGEQEVFEYCLEDGSLIRATKDHKFMTVDGQMLPIDEIFERELDLMRVDNLPN

SEQ ID NO: 144 - DNA, 9009 bp, Artificial Sequence
  Synthetic Polynucleotide
cccggggttattaatagtaatcaattacggggtcattagttcatagcccatatatggagttccgcgttacataacttacggtaaatggcccgcctggctgaccgcccaacgacccccgcccattgacgtcaataatgacgtatgttcccatagtaacgccaatagggactttccattgacgtcaatgggtggagtatttacggtaaactgcccacttggcagtacatcaagtgtatcatatgccaagtacgccccctattgacgtcaatgacggtaaatggcccgcctggcattatgcccagtacatgaccttatgggactttcctacttggcagtacatctacgtattagtcatcgctattaccatggtgatgcggttttggcagtacatcaatgggcgtggatagcggtttgactcacggggatttccaagtctccaccccattgacgtcaatgggagtttgttttggcaccaaaatcaacgggactttccaaaatgtcgtaacaactccgccccattgacgcaaatgggcggtaggcgtgtacggtgggaggtctatataagcagagctctctggctaactgtcgggatcaacaagtttgtacaaaaaagcaggctccgaattcaccggtgccgccaccatgattaagatcgctacgcggaagtacctggggaaacagaacgtctacgacataggtgtggagcgcgatcacaactttgctctgaaaaatggatttatcgccagcaactgcccgcggctccgggcgtatatgctccgcattggtcttgaccaactctatcagagcttggttgacggcaatttcgatgatgcagcttgggcgcagggtcgatgcgacgcaatcgtccgatccggagccgggactgtcgggcgtacacaaatcgcccgcagaagcgcggccgtctggaccgatggctgtgtagaagtactcgccgatagtggaaaccgacgccccagcactcgtccgagggcaaaggaatagttaattaagaattcgacccagctttcttgtacaaagtggttggtaagcctatccctaaccctctcctcggtctcgattctacgtagtaatgagctagcagtctcgaggttaacgaattccgccccccccctaacgttactggccgaagccgcttggaataaggccggtgtgcgcttgtctatatgttattttccaccatattgccgtcttttggcaatgtgagggcccggaaacctggccctgtcttcttgacgagcattcctaggggtctttcccctctcgccaaaggaatgcaaggtctgttgaatgtcgtgaaggaagcagttcctctggaagcttcttgaagacaaacaacgtctgtagcgaccctttgcaggcagcggaaccccccacctggcgacaggtgcccctgcggccaaaagccacgtgtataagatacacctgcaaaggcggcacaaccccagtgccacgttgtgagttggatagttgtggaaagagtcaaatggctctcctcaagcgtattcaacaaggggctgaaggatgcccagaaggtaccccattgtatgggatctgatctggggcctcggtgcacatgctttacatgtgtttagtcgaggttaaaaaaacgtctaggccccccgaaccacggggacgtggttttcctttgaaaaacacgataataccatggtgagcaagggcgaggaggataacatggccatcatcaaggagttcatgcgcttcaaggtgcacatggagggctccgtgaacggccacgagttcgagatcgagggcgagggcgagggccgcccctacgagggcacccagaccgccaagctgaaggtgaccaagggtggccccctgcccttcgcctgggacatcctgtcccctcagttcatgtacggctccaaggcctacgtgaagcaccccgccgacatccccgactacttgaagctgtccttccccgagggcttcaagtgggagcgcgtgatgaacttcgaggacggcggcgtggtgaccgtgacccaggactcctccctgcaggacggcgagttcatctacaaggtgaagctgcgcggcaccaacttcccctccgacggccccgtaatgcagaagaagaccatgggctgggaggcctcctccgagcggatgtaccccgaggacggcgccctgaagggcgagatcaagcagaggctgaagctgaaggacggcggccactacgacgctgaggtcaagaccacctacaaggccaagaagcccgtgcagctgcccggcgcctacaacgtcaacatcaagttggacatcacctcccacaacgaggactacaccatcgtggaacagtacgaacgcgccgagggccgccactccaccggcggcatggacgagctgtacaagtaacaccggtggcgcgttaagtcgacaatcaacctctggattacaaaatttgtgaaagattgactggtattcttaactatgttgctccttttacgctatgtggatacgctgctttaatgcctttgtatcatgctattgcttcccgtatggctttcattttctcctccttgtataaatcctggttgctgtctctttatgaggagttgtggcccgttgtcaggcaacgtggcgtggtgtgcactgtgtttgctgacgcaacccccactggttggggcattgccaccacctgtcagctcctttccgggactttcgctttccccctccctattgccacggcggaactcatcgccgcctgccttgcccgctgctggacaggggctcggctgttgggcactgacaattccgtggtgttgtcggggaaatcatcgtcctttccttggctgctcgcctgtgttgccacctggattctgcgcgggacgtccttctgctacgtcccttcggccctcaatccagcggaccttccttcccgcggcctgctgccggctctgcggcctcttccgcgtcttcgccttcgccctcagacgagtcggatctccctttgggccgcctccccgcgtcgactttaagaccaatgacttacaaggcagctgtagatcttagccactttttaaaagaaaaggggggactggaagggctaattcactcccaacgaagacaagatctgctttttgcttgtactgggtctctctggttagaccagatctgagcctgggagctctctggctaactagggaacccactgcttaagcctcaataaagcttgccttgagtgcttcaagtagtgtgtgcccgtctgttgtgtgactctggtaactagagatccctcagacccttttagtcagtgtggaaaatctctagcagtacgtatagtagttcatgtcatcttattattcagtatttataacttgcaaagaaatgaatatcagagagtgagaggaacttgtttattgcagcttataatggttacaaataaagcaatagcatcacaaatttcacaaataaagcatttttttcactgcattctagttgtggtttgtccaaactcatcaatgtatcttatcatgtctggctctagctatcccgcccctaactccgcccatcccgcccctaactccgcccagttccgcccattctccgccccatggctgactaattttttttatttatgcagaggccgaggccgcctcggcctctgagctattccagaagtagtgaggaggcttttttggaggcctagggacgtacccaattcgccctatagtgagtcgtattacgcgcgctcactggccgtcgttttacaacgtcgtgactgggaaaaccctggcgttacccaacttaatcgccttgcagcacatccccctttcgccagctggcgtaatagcgaagaggcccgcaccgatcgcccttcccaacagttgcgcagcctgaatggcgaatgggacgcgccctgtagcggcgcattaagcgcggcgggtgtggtggttacgcgcagcgtgaccgctacacttgccagcgccctagcgcccgctcctttcgctttcttcccttcctttctcgccacgttcgccggctttccccgtcaagctctaaatcgggggctccctttagggttccgatttagtgctttacggcacctcgaccccaaaaaacttgattagggtgatggttcacgtagtgggccatcgccctgatagacggtttttcgccctttgacgttggagtccacgttctttaatagtggactcttgttccaaactggaacaacactcaaccctatctcggtctattcttttgatttataagggattttgccgatttcggcctattggttaaaaaatgagctgatttaacaaaaatttaacgcgaattttaacaaaatattaacgcttacaatttaggtggcacttttcggggaaatgtgcgcggaacccctatttgtttatttttctaaatacattcaaatatgtatccgctcatgagacaataaccctgataaatgcttcaataatattgaaaaaggaagagtatgagtattcaacatttccgtgtcgcccttattcccttttttgcggcattttgccttcctgtttttgctcacccagaaacgctggtgaaagtaaaagatgctgaagatcagttgggtgcacgagtgggttacatcgaactggatctcaacagcggtaagatccttgagagttttcgccccgaagaacgttttccaatgatgagcacttttaaagttctgctatgtggcgcggtattatcccgtattgacgccgggcaagagcaactcggtcgccgcatacactattctcagaatgacttggttgagtactcaccagtcacagaaaagcatcttacggatggcatgacagtaagagaattatgcagtgctgccataaccatgagtgataacactgcggccaacttacttctgacaacgatcggaggaccgaaggagctaaccgcttttttgcacaacatgggggatcatgtaactcgccttgatcgttgggaaccggagctgaatgaagccataccaaacgacgagcgtgacaccacgatgcctgtagcaatggcaacaacgttgcgcaaactattaactggcgaactacttactctagcttcccggcaacaattaatagactggatggaggcggataaagttgcaggaccacttctgcgctcggcccttccggctggctggtttattgctgataaatctggagccggtgagcgtgggtctcgcggtatcattgcagcactggggccagatggtaagccctcccgtatcgtagttatctacacgacggggagtcaggcaactatggatgaacgaaatagacagatcgctgagataggtgcctcactgattaagcattggtaactgtcagaccaagtttactcatatatactttagattgatttaaaacttcatttttaatttaaaaggatctaggtgaagatcctttttgataatctcatgaccaaaatcccttaacgtgagttttcgttccactgagcgtcagaccccgtagaaaagatcaaaggatcttcttgagatcctttttttctgcgcgtaatctgctgcttgcaaacaaaaaaaccaccgctaccagcggtggtttgtttgccggatcaagagctaccaactctttttccgaaggtaactggcttcagcagagcgcagataccaaatactgttcttctagtgtagccgtagttaggccaccacttcaagaactctgtagcaccgcctacatacctcgctctgctaatcctgttaccagtggctgctgccagtggcgataagtcgtgtcttaccgggttggactcaagacgatagttaccggataaggcgcagcggtcgggctgaacggggggttcgtgcacacagcccagcttggagcgaacgacctacaccgaactgagatacctacagcgtgagctatgagaaagcgccacgcttcccgaagggagaaaggcggacaggtatccggtaagcggcagggtcggaacaggagagcgcacgagggagcttccagggggaaacgcctggtatctttatagtcctgtcgggtttcgccacctctgacttgagcgtcgatttttgtgatgctcgtcaggggggcggagcctatggaaaaacgccagcaacgcggcctttttacggttcctggccttttgctggccttttgctcacatgttctttcctgcgttatcccctgattctgtggataaccgtattaccgcctttgagtgagctgataccgctcgccgcagccgaacgaccgagcgcagcgagtcagtgagcgaggaagcggaagagcgcccaatacgcaaaccgcctctccccgcgcgttggccgattcattaatgcagctggcacgacaggtttcccgactggaaagcgggcagtgagcgcaacgcaattaatgtgagttagctcactcattaggcaccccaggctttacactttatgcttccggctcgtatgttgtgtggaattgtgagcggataacaatttcacacaggaaacagctatgaccatgattacgccaagcgcgcaattaaccctcactaaagggaacaaaagctggagctgcaagcttaatgtagtcttatgcaatactcttgtagtcttgcaacatggtaacgatgagttagcaacatgccttacaaggagagaaaaagcaccgtgcatgccgattggtggaagtaaggtggtacgatcgtgccttattaggaaggcaacagacgggtctgacatggattggacgaaccactgaattgccgcattgcagagatattgtatttaagtgcctagctcgatacataaacgggtctctctggttagaccagatctgagcctgggagctctctggctaactagggaacccactgcttaagcctcaataaagcttgccttgagtgcttcaagtagtgtgtgcccgtctgttgtgtgactctggtaactagagatccctcagacccttttagtcagtgtggaaaatctctagcagtggcgcccgaacagggacttgaaagcgaaagggaaaccagaggagctctctcgacgcaggactcggcttgctgaagcgcgcacggcaagaggcgaggggcggcgactggtgagtacgccaaaaattttgactagcggaggctagaaggagagagatgggtgcgagagcgtcagtattaagcgggggagaattagatcgcgatgggaaaaaattcggttaaggccagggggaaagaaaaaatataaattaaaacatatagtatgggcaagcagggagctagaacgattcgcagttaatcctggcctgttagaaacatcagaaggctgtagacaaatactgggacagctacaaccatcccttcagacaggatcagaagaacttagatcattatataatacagtagcaaccctctattgtgtgcatcaaaggatagagataaaagacaccaaggaagctttagacaagatagaggaagagcaaaacaaaagtaagaccaccgcacagcaagcggccgctgatcttcagacctggaggaggagatatgagggacaattggagaagtgaattatataaatataaagtagtaaaaattgaaccattaggagtagcacccaccaaggcaaagagaagagtggtgcagagagaaaaaagagcagtgggaataggagctttgttccttgggttcttgggagcagcaggaagcactatgggcgcagcgtcaatgacgctgacggtacaggccagacaattattgtctggtatagtgcagcagcagaacaatttgctgagggctattgaggcgcaacagcatctgttgcaactcacagtctggggcatcaagcagctccaggcaagaatcctggctgtggaaagatacctaaaggatcaacagctcctggggatttggggttgctctggaaaactcatttgcaccactgctgtgccttggaatgctagttggagtaataaatctctggaacagatttggaatcacacgacctggatggagtgggacagagaaattaacaattacacaagcttaatacactccttaattgaagaatcgcaaaaccagcaagaaaagaatgaacaagaattattggaattagataaatgggcaagtttgtggaattggtttaacataacaaattggctgtggtatataaaattattcataatgatagtaggaggcttggtaggtttaagaatagtttttgctgtactttctatagtgaatagagttaggcagggatattcaccattatcgtttcagacccacctcccaaccccgaggggacccttgcgccttttccaaggcagccctgggtttgcgcagggacgcggctgctctgggcgtggttccgggaaacgcagcggcgccgaccctgggtctcgcacattcttcacgtccgttcgcagcgtcacccggatcttcgccgctacccttgtgggccccccggcgacgcttcctgctccgcccctaagtcgggaaggttccttgcggttcgcggcgtgccggacgtgacaaacggaagccgcacgtctcactagtaccctcgcagacggacagcgccagggagcaatggcagcgcgccgaccgcgatgggctgtggccaatagcggctgctcagcagggcgcgccgagagcagcggccgggaaggggcggtgcgggaggcggggtgtggggcggtagtgtgggccctgttcctgcccgcgcggtgttccgcattctgcaagcctccggagcgcacgtcggcagtcggctccctcgttgaccgaatcaccgacctctctccccagggggtacccagctgtctagagaattctagatcttgagacaaatggcagtattcatccacaattttaaaagaaaaggggggattggggggtacagtgcaggggaaagaatagtagacataatagcaacagacatacaaactaaagaattacaaaaacaaattacaaaaattcaaaattttcgggtttattacagggacagcagagatccactttggcgccggctcgaggggg

SEQ ID NO: 145 - protein, 119 aa, Artificial Sequence
  Synthetic Polypeptide
MIKIATRKYLGKQNVYDIGVERDHNFALKNGFIASNCPRLRAYMLRIGLDQLYQSLVDGNFDDAAWAQGRCDAIVRSGAGTVGRTQIARRSAAVWTDGCVEVLADSGNRRPSTRPRAKE

SEQ ID NO: 146 - DNA, 9783 bp, Artificial Sequence
  Synthetic Polynucleotide
cccggggttattaatagtaatcaattacggggtcattagttcatagcccatatatggagttccgcgttacataacttacggtaaatggcccgcctggctgaccgcccaacgacccccgcccattgacgtcaataatgacgtatgttcccatagtaacgccaatagggactttccattgacgtcaatgggtggagtatttacggtaaactgcccacttggcagtacatcaagtgtatcatatgccaagtacgccccctattgacgtcaatgacggtaaatggcccgcctggcattatgcccagtacatgaccttatgggactttcctacttggcagtacatctacgtattagtcatcgctattaccatggtgatgcggttttggcagtacatcaatgggcgtggatagcggtttgactcacggggatttccaagtctccaccccattgacgtcaatgggagtttgttttggcaccaaaatcaacgggactttccaaaatgtcgtaacaactccgccccattgacgcaaatgggcggtaggcgtgtacggtgggaggtctatataagcagagctctctggctaactgtcgggatcaacaagtttgtacaaaaaagcaggctccgaattcaccggtgccaccatgaaaaagcctgaactcaccgcgacgtctgtcgagaagtttctgatcgaaaagttcgacagcgtctccgacctgatgcagctctcggagggcgaagaatctcgtgctttcagcttcgatgtaggagggcgtggatatgtcctgcgggtaaatagctgcgccgatggtttctacaaagatcgttatgtttatcggcactttgcatcggccgcgctcccgattccggaagtgcttgacattggggaatttagcgagagcctgacctattgcatctcccgccgtgcacagggtgtcacgttgcaagacctgcctgaaaccgaactgcccgctgttctgcagccggtcgcggaggccatggatgcgatcgctgcggccgatcttagccagacgagcgggttcggcccattcggaccgcaaggaatcggtcaatacactacatggcgtgatttcatatgcgcgattgctgatccccatgtgtatcactggcaaactgtgatggacgacaccgtcagtgcgtccgtcgcgcaggctctcgatgagctgatgctttgggccgaggactgccccgaagtccggcacctcgtgcacgcggatttcggctccaacaatgtcctgacggacaatggccgcataacagcggtcattgactggagcgaggcgatgttcggggattcccaatacgaggtcgccaacatcttcttctggaggccgtggttggcttgtatggagcagcagacgcgctacttcgagcggaggcatccggagcttgcaggatcgccgcggctccgggcgtatatgctccgcattggtcttgaccaactctatcagagctgcctttcatacgagaccgagatcctgactgtcgagtacggattgcttcctatcggcaaaatcgtggagaagaggattgaatgtaccgtctattcagtcgataataatgggaacatctacacacagcccgtggctcaatggcacgacagaggagagcaggaagtttttgaatactgtctcgaggacggatccctcatccgcgctactaaagatcataagtttatgaccgtggacggccagatgctgccaattgacgaaatttttgaacgagagctggatctgatgagagtcgacaaccttccaaactgattaattaagaattcgacccagctttcttgtacaaagtggttggtaagcctatccctaaccctctcctcggtctcgattctacgtagtaatgagctagcagtctcgaggttaacgaattccgccccccccctaacgttactggccgaagccgcttggaataaggccggtgtgcgcttgtctatatgttattttccaccatattgccgtcttttggcaatgtgagggcccggaaacctggccctgtcttcttgacgagcattcctaggggtctttcccctctcgccaaaggaatgcaaggtctgttgaatgtcgtgaaggaagcagttcctctggaagcttcttgaagacaaacaacgtctgtagcgaccctttgcaggcagcggaaccccccacctggcgacaggtgcccctgcggccaaaagccacgtgtataagatacacctgcaaaggcggcacaaccccagtgccacgttgtgagttggatagttgtggaaagagtcaaatggctctcctcaagcgtattcaacaaggggctgaaggatgcccagaaggtaccccattgtatgggatctgatctggggcctcggtgcacatgctttacatgtgtttagtcgaggttaaaaaaacgtctaggccccccgaaccacggggacgtggttttcctttgaaaaacacgataataccatggccatgagcgagctgattaaggagaacatgcacatgaagctgtacatggagggcaccgtggacaaccatcacttcaagtgcacatccgagggcgaaggcaagccctacgagggcacccagaccatgagaatcaaggtggtcgagggcggccctctccccttcgccttcgacatcctggctactagcttcctctacggcagcaagaccttcatcaaccacacccagggcatccccgacttcttcaagcagtccttccctgagggcttcacatgggagagagtcaccacatacgaagacgggggcgtgctgaccgctacccaggacaccagcctccaggacggctgcctcatctacaacgtcaagatcagaggggtgaacttcacatccaacggccctgtgatgcagaagaaaacactcggctgggaggccttcaccgagacgctgtaccccgctgacggcggcctggaaggcagaaacgacatggccctgaagctcgtgggcgggagccatctgatcgcaaacatcaagaccacatatagatccaagaaacccgctaagaacctcaagatgcctggcgtctactatgtggactacagactggaaagaatcaaggaggccaacaacgagacctacgtcgagcagcacgaggtggcagtggccagatactgcgacctccctagcaaactggggcacaagcttaattaacaccggtggcgcgttaagtcgacaatcaacctctggattacaaaatttgtgaaagattgactggtattcttaactatgttgctccttttacgctatgtggatacgctgctttaatgcctttgtatcatgctattgcttcccgtatggctttcattttctcctccttgtataaatcctggttgctgtctctttatgaggagttgtggcccgttgtcaggcaacgtggcgtggtgtgcactgtgtttgctgacgcaacccccactggttggggcattgccaccacctgtcagctcctttccgggactttcgctttccccctccctattgccacggcggaactcatcgccgcctgccttgcccgctgctggacaggggctcggctgttgggcactgacaattccgtggtgttgtcggggaaatcatcgtcctttccttggctgctcgcctgtgttgccacctggattctgcgcgggacgtccttctgctacgtcccttcggccctcaatccagcggaccttccttcccgcggcctgctgccggctctgcggcctcttccgcgtcttcgccttcgccctcagacgagtcggatctccctttgggccgcctccccgcgtcgactttaagaccaatgacttacaaggcagctgtagatcttagccactttttaaaagaaaaggggggactggaagggctaattcactcccaacgaagacaagatctgctttttgcttgtactgggtctctctggttagaccagatctgagcctgggagctctctggctaactagggaacccactgcttaagcctcaataaagcttgccttgagtgcttcaagtagtgtgtgcccgtctgttgtgtgactctggtaactagagatccctcagacccttttagtcagtgtggaaaatctctagcagtacgtatagtagttcatgtcatcttattattcagtatttataacttgcaaagaaatgaatatcagagagtgagaggaacttgtttattgcagcttataatggttacaaataaagcaatagcatcacaaatttcacaaataaagcatttttttcactgcattctagttgtggtttgtccaaactcatcaatgtatcttatcatgtctggctctagctatcccgcccctaactccgcccatcccgcccctaactccgcccagttccgcccattctccgccccatggctgactaattttttttatttatgcagaggccgaggccgcctcggcctctgagctattccagaagtagtgaggaggcttttttggaggcctagggacgtacccaattcgccctatagtgagtcgtattacgcgcgctcactggccgtcgttttacaacgtcgtgactgggaaaaccctggcgttacccaacttaatcgccttgcagcacatccccctttcgccagctggcgtaatagcgaagaggcccgcaccgatcgcccttcccaacagttgcgcagcctgaatggcgaatgggacgcgccctgtagcggcgcattaagcgcggcgggtgtggtggttacgcgcagcgtgaccgctacacttgccagcgccctagcgcccgctcctttcgctttcttcccttcctttctcgccacgttcgccggctttccccgtcaagctctaaatcgggggctccctttagggttccgatttagtgctttacggcacctcgaccccaaaaaacttgattagggtgatggttcacgtagtgggccatcgccctgatagacggtttttcgccctttgacgttggagtccacgttctttaatagtggactcttgttccaaactggaacaacactcaaccctatctcggtctattcttttgatttataagggattttgccgatttcggcctattggttaaaaaatgagctgatttaacaaaaatttaacgcgaattttaacaaaatattaacgcttacaatttaggtggcacttttcggggaaatgtgcgcggaacccctatttgtttatttttctaaatacattcaaatatgtatccgctcatgagacaataaccctgataaatgcttcaataatattgaaaaaggaagagtatgagtattcaacatttccgtgtcgcccttattcccttttttgcggcattttgccttcctgtttttgctcacccagaaacgctggtgaaagtaaaagatgctgaagatcagttgggtgcacgagtgggttacatcgaactggatctcaacagcggtaagatccttgagagttttcgccccgaagaacgttttccaatgatgagcacttttaaagttctgctatgtggcgcggtattatcccgtattgacgccgggcaagagcaactcggtcgccgcatacactattctcagaatgacttggttgagtactcaccagtcacagaaaagcatcttacggatggcatgacagtaagagaattatgcagtgctgccataaccatgagtgataacactgcggccaacttacttctgacaacgatcggaggaccgaaggagctaaccgcttttttgcacaacatgggggatcatgtaactcgccttgatcgttgggaaccggagctgaatgaagccataccaaacgacgagcgtgacaccacgatgcctgtagcaatggcaacaacgttgcgcaaactattaactggcgaactacttactctagcttcccggcaacaattaatagactggatggaggcggataaagttgcaggaccacttctgcgctcggcccttccggctggctggtttattgctgataaatctggagccggtgagcgtgggtctcgcggtatcattgcagcactggggccagatggtaagccctcccgtatcgtagttatctacacgacggggagtcaggcaactatggatgaacgaaatagacagatcgctgagataggtgcctcactgattaagcattggtaactgtcagaccaagtttactcatatatactttagattgatttaaaacttcatttttaatttaaaaggatctaggtgaagatcctttttgataatctcatgaccaaaatcccttaacgtgagttttcgttccactgagcgtcagaccccgtagaaaagatcaaaggatcttcttgagatcctttttttctgcgcgtaatctgctgcttgcaaacaaaaaaaccaccgctaccagcggtggtttgtttgccggatcaagagctaccaactctttttccgaaggtaactggcttcagcagagcgcagataccaaatactgttcttctagtgtagccgtagttaggccaccacttcaagaactctgtagcaccgcctacatacctcgctctgctaatcctgttaccagtggctgctgccagtggcgataagtcgtgtcttaccgggttggactcaagacgatagttaccggataaggcgcagcggtcgggctgaacggggggttcgtgcacacagcccagcttggagcgaacgacctacaccgaactgagatacctacagcgtgagctatgagaaagcgccacgcttcccgaagggagaaaggcggacaggtatccggtaagcggcagggtcggaacaggagagcgcacgagggagcttccagggggaaacgcctggtatctttatagtcctgtcgggtttcgccacctctgacttgagcgtcgatttttgtgatgctcgtcaggggggcggagcctatggaaaaacgccagcaacgcggcctttttacggttcctggccttttgctggccttttgctcacatgttctttcctgcgttatcccctgattctgtggataaccgtattaccgcctttgagtgagctgataccgctcgccgcagccgaacgaccgagcgcagcgagtcagtgagcgaggaagcggaagagcgcccaatacgcaaaccgcctctccccgcgcgttggccgattcattaatgcagctggcacgacaggtttcccgactggaaagcgggcagtgagcgcaacgcaattaatgtgagttagctcactcattaggcaccccaggctttacactttatgcttccggctcgtatgttgtgtggaattgtgagcggataacaatttcacacaggaaacagctatgaccatgattacgccaagcgcgcaattaaccctcactaaagggaacaaaagctggagctgcaagcttaatgtagtcttatgcaatactcttgtagtcttgcaacatggtaacgatgagttagcaacatgccttacaaggagagaaaaagcaccgtgcatgccgattggtggaagtaaggtggtacgatcgtgccttattaggaaggcaacagacgggtctgacatggattggacgaaccactgaattgccgcattgcagagatattgtatttaagtgcctagctcgatacataaacgggtctctctggttagaccagatctgagcctgggagctctctggctaactagggaacccactgcttaagcctcaataaagcttgccttgagtgcttcaagtagtgtgtgcccgtctgttgtgtgactctggtaactagagatccctcagacccttttagtcagtgtggaaaatctctagcagtggcgcccgaacagggacttgaaagcgaaagggaaaccagaggagctctctcgacgcaggactcggcttgctgaagcgcgcacggcaagaggcgaggggcggcgactggtgagtacgccaaaaattttgactagcggaggctagaaggagagagatgggtgcgagagcgtcagtattaagcgggggagaattagatcgcgatgggaaaaaattcggttaaggccagggggaaagaaaaaatataaattaaaacatatagtatgggcaagcagggagctagaacgattcgcagttaatcctggcctgttagaaacatcagaaggctgtagacaaatactgggacagctacaaccatcccttcagacaggatcagaagaacttagatcattatataatacagtagcaaccctctattgtgtgcatcaaaggatagagataaaagacaccaaggaagctttagacaagatagaggaagagcaaaacaaaagtaagaccaccgcacagcaagcggccgctgatcttcagacctggaggaggagatatgagggacaattggagaagtgaattatataaatataaagtagtaaaaattgaaccattaggagtagcacccaccaaggcaaagagaagagtggtgcagagagaaaaaagagcagtgggaataggagctttgttccttgggttcttgggagcagcaggaagcactatgggcgcagcgtcaatgacgctgacggtacaggccagacaattattgtctggtatagtgcagcagcagaacaatttgctgagggctattgaggcgcaacagcatctgttgcaactcacagtctggggcatcaagcagctccaggcaagaatcctggctgtggaaagatacctaaaggatcaacagctcctggggatttggggttgctctggaaaactcatttgcaccactgctgtgccttggaatgctagttggagtaataaatctctggaacagatttggaatcacacgacctggatggagtgggacagagaaattaacaattacacaagcttaatacactccttaattgaagaatcgcaaaaccagcaagaaaagaatgaacaagaattattggaattagataaatgggcaagtttgtggaattggtttaacataacaaattggctgtggtatataaaattattcataatgatagtaggaggcttggtaggtttaagaatagtttttgctgtactttctatagtgaatagagttaggcagggatattcaccattatcgtttcagacccacctcccaaccccgaggggacccttgcgccttttccaaggcagccctgggtttgcgcagggacgcggctgctctgggcgtggttccgggaaacgcagcggcgccgaccctgggtctcgcacattcttcacgtccgttcgcagcgtcacccggatcttcgccgctacccttgtgggccccccggcgacgcttcctgctccgcccctaagtcgggaaggttccttgcggttcgcggcgtgccggacgtgacaaacggaagccgcacgtctcactagtaccctcgcagacggacagcgccagggagcaatggcagcgcgccgaccgcgatgggctgtggccaatagcggctgctcagcagggcgcgccgagagcagcggccgggaaggggcggtgcgggaggcggggtgtggggcggtagtgtgggccctgttcctgcccgcgcggtgttccgcattctgcaagcctccggagcgcacgtcggcagtcggctccctcgttgaccgaatcaccgacctctctccccagggggtacccagctgtctagagaattctagatcttgagacaaatggcagtattcatccacaattttaaaagaaaaggggggattggggggtacagtgcaggggaaagaatagtagacataatagcaacagacatacaaactaaagaattacaaaaacaaattacaaaaattcaaaattttcgggtttattacagggacagcagagatccactttggcgccggctcgaggggg

SEQ ID NO: 147 - protein, 379 aa, Artificial Sequence
  Synthetic Polypeptide
MKKPELTATSVEKFLIEKFDSVSDLMQLSEGEESRAFSFDVGGRGYVLRVNSCADGFYKDRYVYRHFASAALPIPEVLDIGEFSESLTYCISRRAQGVTLQDLPETELPAVLQPVAEAMDAIAAADLSQTSGFGPFGPQGIGQYTTWRDFICAIADPHVYHWQTVMDDTVSASVAQALDELMLWAEDCPEVRHLVHADFGSNNVLTDNGRITAVIDWSEAMFGDSQYEVANIFFWRPWLACMEQQTRYFERRHPELAGSPRLRAYMLRIGLDQLYQSCLSYETEILTVEYGLLPIGKIVEKRIECTVYSVDNNGNIYTQPVAQWHDRGEQEVFEYCLEDGSLIRATKDHKFMTVDGQMLPIDEIFERELDLMRVDNLPN

SEQ ID NO: 148 - DNA, 8955 bp, Artificial Sequence
  Synthetic Polynucleotide
cccggggttattaatagtaatcaattacggggtcattagttcatagcccatatatggagttccgcgttacataacttacggtaaatggcccgcctggctgaccgcccaacgacccccgcccattgacgtcaataatgacgtatgttcccatagtaacgccaatagggactttccattgacgtcaatgggtggagtatttacggtaaactgcccacttggcagtacatcaagtgtatcatatgccaagtacgccccctattgacgtcaatgacggtaaatggcccgcctggcattatgcccagtacatgaccttatgggactttcctacttggcagtacatctacgtattagtcatcgctattaccatggtgatgcggttttggcagtacatcaatgggcgtggatagcggtttgactcacggggatttccaagtctccaccccattgacgtcaatgggagtttgttttggcaccaaaatcaacgggactttccaaaatgtcgtaacaactccgccccattgacgcaaatgggcggtaggcgtgtacggtgggaggtctatataagcagagctctctggctaactgtcgggatcaacaagtttgtacaaaaaagcaggctccgaattcaccggtgccgccaccatgattaagatcgctacgcggaagtacctggggaaacagaacgtctacgacataggtgtggagcgcgatcacaactttgctctgaaaaatggatttatcgccagcaactgcttggttgacggcaatttcgatgatgcagcttgggcgcagggtcgatgcgacgcaatcgtccgatccggagccgggactgtcgggcgtacacaaatcgcccgcagaagcgcggccgtctggaccgatggctgtgtagaagtactcgccgatagtggaaaccgacgccccagcactcgtccgagggcaaaggaatagttaattaagaattcgacccagctttcttgtacaaagtggttggtaagcctatccctaaccctctcctcggtctcgattctacgtagtaatgagctagcagtctcgaggttaacgaattccgccccccccctaacgttactggccgaagccgcttggaataaggccggtgtgcgcttgtctatatgttattttccaccatattgccgtcttttggcaatgtgagggcccggaaacctggccctgtcttcttgacgagcattcctaggggtctttcccctctcgccaaaggaatgcaaggtctgttgaatgtcgtgaaggaagcagttcctctggaagcttcttgaagacaaacaacgtctgtagcgaccctttgcaggcagcggaaccccccacctggcgacaggtgcccctgcggccaaaagccacgtgtataagatacacctgcaaaggcggcacaaccccagtgccacgttgtgagttggatagttgtggaaagagtcaaatggctctcctcaagcgtattcaacaaggggctgaaggatgcccagaaggtaccccattgtatgggatctgatctggggcctcggtgcacatgctttacatgtgtttagtcgaggttaaaaaaacgtctaggccccccgaaccacggggacgtggttttcctttgaaaaacacgataataccatggtgagcaagggcgaggaggataacatggccatcatcaaggagttcatgcgcttcaaggtgcacatggagggctccgtgaacggccacgagttcgagatcgagggcgagggcgagggccgcccctacgagggcacccagaccgccaagctgaaggtgaccaagggtggccccctgcccttcgcctgggacatcctgtcccctcagttcatgtacggctccaaggcctacgtgaagcaccccgccgacatccccgactacttgaagctgtccttccccgagggcttcaagtgggagcgcgtgatgaacttcgaggacggcggcgtggtgaccgtgacccaggactcctccctgcaggacggcgagttcatctacaaggtgaagctgcgcggcaccaacttcccctccgacggccccgtaatgcagaagaagaccatgggctgggaggcctcctccgagcggatgtaccccgaggacggcgccctgaagggcgagatcaagcagaggctgaagctgaaggacggcggccactacgacgctgaggtcaagaccacctacaaggccaagaagcccgtgcagctgcccggcgcctacaacgtcaacatcaagttggacatcacctcccacaacgaggactacaccatcgtggaacagtacgaacgcgccgagggccgccactccaccggcggcatggacgagctgtacaagtaacaccggtggcgcgttaagtcgacaatcaacctctggattacaaaatttgtgaaagattgactggtattcttaactatgttgctccttttacgctatgtggatacgctgctttaatgcctttgtatcatgctattgcttcccgtatggctttcattttctcctccttgtataaatcctggttgctgtctctttatgaggagttgtggcccgttgtcaggcaacgtggcgtggtgtgcactgtgtttgctgacgcaacccccactggttggggcattgccaccacctgtcagctcctttccgggactttcgctttccccctccctattgccacggcggaactcatcgccgcctgccttgcccgctgctggacaggggctcggctgttgggcactgacaattccgtggtgttgtcggggaaatcatcgtcctttccttggctgctcgcctgtgttgccacctggattctgcgcgggacgtccttctgctacgtcccttcggccctcaatccagcggaccttccttcccgcggcctgctgccggctctgcggcctcttccgcgtcttcgccttcgccctcagacgagtcggatctccctttgggccgcctccccgcgtcgactttaagaccaatgacttacaaggcagctgtagatcttagccactttttaaaagaaaaggggggactggaagggctaattcactcccaacgaagacaagatctgctttttgcttgtactgggtctctctggttagaccagatctgagcctgggagctctctggctaactagggaacccactgcttaagcctcaataaagcttgccttgagtgcttcaagtagtgtgtgcccgtctgttgtgtgactctggtaactagagatccctcagacccttttagtcagtgtggaaaatctctagcagtacgtatagtagttcatgtcatcttattattcagtatttataacttgcaaagaaatgaatatcagagagtgagaggaacttgtttattgcagcttataatggttacaaataaagcaatagcatcacaaatttcacaaataaagcatttttttcactgcattctagttgtggtttgtccaaactcatcaatgtatcttatcatgtctggctctagctatcccgcccctaactccgcccatcccgcccctaactccgcccagttccgcccattctccgccccatggctgactaattttttttatttatgcagaggccgaggccgcctcggcctctgagctattccagaagtagtgaggaggcttttttggaggcctagggacgtacccaattcgccctatagtgagtcgtattacgcgcgctcactggccgtcgttttacaacgtcgtgactgggaaaaccctggcgttacccaacttaatcgccttgcagcacatccccctttcgccagctggcgtaatagcgaagaggcccgcaccgatcgcccttcccaacagttgcgcagcctgaatggcgaatgggacgcgccctgtagcggcgcattaagcgcggcgggtgtggtggttacgcgcagcgtgaccgctacacttgccagcgccctagcgcccgctcctttcgctttcttcccttcctttctcgccacgttcgccggctttccccgtcaagctctaaatcgggggctccctttagggttccgatttagtgctttacggcacctcgaccccaaaaaacttgattagggtgatggttcacgtagtgggccatcgccctgatagacggtttttcgccctttgacgttggagtccacgttctttaatagtggactcttgttccaaactggaacaacactcaaccctatctcggtctattcttttgatttataagggattttgccgatttcggcctattggttaaaaaatgagctgatttaacaaaaatttaacgcgaattttaacaaaatattaacgcttacaatttaggtggcacttttcggggaaatgtgcgcggaacccctatttgtttatttttctaaatacattcaaatatgtatccgctcatgagacaataaccctgataaatgcttcaataatattgaaaaaggaagagtatgagtattcaacatttccgtgtcgcccttattcccttttttgcggcattttgccttcctgtttttgctcacccagaaacgctggtgaaagtaaaagatgctgaagatcagttgggtgcacgagtgggttacatcgaactggatctcaacagcggtaagatccttgagagttttcgccccgaagaacgttttccaatgatgagcacttttaaagttctgctatgtggcgcggtattatcccgtattgacgccgggcaagagcaactcggtcgccgcatacactattctcagaatgacttggttgagtactcaccagtcacagaaaagcatcttacggatggcatgacagtaagagaattatgcagtgctgccataaccatgagtgataacactgcggccaacttacttctgacaacgatcggaggaccgaaggagctaaccgcttttttgcacaacatgggggatcatgtaactcgccttgatcgttgggaaccggagctgaatgaagccataccaaacgacgagcgtgacaccacgatgcctgtagcaatggcaacaacgttgcgcaaactattaactggcgaactacttactctagcttcccggcaacaattaatagactggatggaggcggataaagttgcaggaccacttctgcgctcggcccttccggctggctggtttattgctgataaatctggagccggtgagcgtgggtctcgcggtatcattgcagcactggggccagatggtaagccctcccgtatcgtagttatctacacgacggggagtcaggcaactatggatgaacgaaatagacagatcgctgagataggtgcctcactgattaagcattggtaactgtcagaccaagtttactcatatatactttagattgatttaaaacttcatttttaatttaaaaggatctaggtgaagatcctttttgataatctcatgaccaaaatcccttaacgtgagttttcgttccactgagcgtcagaccccgtagaaaagatcaaaggatcttcttgagatcctttttttctgcgcgtaatctgctgcttgcaaacaaaaaaaccaccgctaccagcggtggtttgtttgccggatcaagagctaccaactctttttccgaaggtaactggcttcagcagagcgcagataccaaatactgttcttctagtgtagccgtagttaggccaccacttcaagaactctgtagcaccgcctacatacctcgctctgctaatcctgttaccagtggctgctgccagtggcgataagtcgtgtcttaccgggttggactcaagacgatagttaccggataaggcgcagcggtcgggctgaacggggggttcgtgcacacagcccagcttggagcgaacgacctacaccgaactgagatacctacagcgtgagctatgagaaagcgccacgcttcccgaagggagaaaggcggacaggtatccggtaagcggcagggtcggaacaggagagcgcacgagggagcttccagggggaaacgcctggtatctttatagtcctgtcgggtttcgccacctctgacttgagcgtcgatttttgtgatgctcgtcaggggggcggagcctatggaaaaacgccagcaacgcggcctttttacggttcctggccttttgctggccttttgctcacatgttctttcctgcgttatcccctgattctgtggataaccgtattaccgcctttgagtgagctgataccgctcgccgcagccgaacgaccgagcgcagcgagtcagtgagcgaggaagcggaagagcgcccaatacgcaaaccgcctctccccgcgcgttggccgattcattaatgcagctggcacgacaggtttcccgactggaaagcgggcagtgagcgcaacgcaattaatgtgagttagctcactcattaggcaccccaggctttacactttatgcttccggctcgtatgttgtgtggaattgtgagcggataacaatttcacacaggaaacagctatgaccatgattacgccaagcgcgcaattaaccctcactaaagggaacaaaagctggagctgcaagcttaatgtagtcttatgcaatactcttgtagtcttgcaacatggtaacgatgagttagcaacatgccttacaaggagagaaaaagcaccgtgcatgccgattggtggaagtaaggtggtacgatcgtgccttattaggaaggcaacagacgggtctgacatggattggacgaaccactgaattgccgcattgcagagatattgtatttaagtgcctagctcgatacataaacgggtctctctggttagaccagatctgagcctgggagctctctggctaactagggaacccactgcttaagcctcaataaagcttgccttgagtgcttcaagtagtgtgtgcccgtctgttgtgtgactctggtaactagagatccctcagacccttttagtcagtgtggaaaatctctagcagtggcgcccgaacagggacttgaaagcgaaagggaaaccagaggagctctctcgacgcaggactcggcttgctgaagcgcgcacggcaagaggcgaggggcggcgactggtgagtacgccaaaaattttgactagcggaggctagaaggagagagatgggtgcgagagcgtcagtattaagcgggggagaattagatcgcgatgggaaaaaattcggttaaggccagggggaaagaaaaaatataaattaaaacatatagtatgggcaagcagggagctagaacgattcgcagttaatcctggcctgttagaaacatcagaaggctgtagacaaatactgggacagctacaaccatcccttcagacaggatcagaagaacttagatcattatataatacagtagcaaccctctattgtgtgcatcaaaggatagagataaaagacaccaaggaagctttagacaagatagaggaagagcaaaacaaaagtaagaccaccgcacagcaagcggccgctgatcttcagacctggaggaggagatatgagggacaattggagaagtgaattatataaatataaagtagtaaaaattgaaccattaggagtagcacccaccaaggcaaagagaagagtggtgcagagagaaaaaagagcagtgggaataggagctttgttccttgggttcttgggagcagcaggaagcactatgggcgcagcgtcaatgacgctgacggtacaggccagacaattattgtctggtatagtgcagcagcagaacaatttgctgagggctattgaggcgcaacagcatctgttgcaactcacagtctggggcatcaagcagctccaggcaagaatcctggctgtggaaagatacctaaaggatcaacagctcctggggatttggggttgctctggaaaactcatttgcaccactgctgtgccttggaatgctagttggagtaataaatctctggaacagatttggaatcacacgacctggatggagtgggacagagaaattaacaattacacaagcttaatacactccttaattgaagaatcgcaaaaccagcaagaaaagaatgaacaagaattattggaattagataaatgggcaagtttgtggaattggtttaacataacaaattggctgtggtatataaaattattcataatgatagtaggaggcttggtaggtttaagaatagtttttgctgtactttctatagtgaatagagttaggcagggatattcaccattatcgtttcagacccacctcccaaccccgaggggacccttgcgccttttccaaggcagccctgggtttgcgcagggacgcggctgctctgggcgtggttccgggaaacgcagcggcgccgaccctgggtctcgcacattcttcacgtccgttcgcagcgtcacccggatcttcgccgctacccttgtgggccccccggcgacgcttcctgctccgcccctaagtcgggaaggttccttgcggttcgcggcgtgccggacgtgacaaacggaagccgcacgtctcactagtaccctcgcagacggacagcgccagggagcaatggcagcgcgccgaccgcgatgggctgtggccaatagcggctgctcagcagggcgcgccgagagcagcggccgggaaggggcggtgcgggaggcggggtgtggggcggtagtgtgggccctgttcctgcccgcgcggtgttccgcattctgcaagcctccggagcgcacgtcggcagtcggctccctcgttgaccgaatcaccgacctctctccccagggggtacccagctgtctagagaattctagatcttgagacaaatggcagtattcatccacaattttaaaagaaaaggggggattggggggtacagtgcaggggaaagaatagtagacataatagcaacagacatacaaactaaagaattacaaaaacaaattacaaaaattcaaaattttcgggtttattacagggacagcagagatccactttggcgccggctcgaggggg

SEQ ID NO: 149 - protein, 101 aa, Artificial Sequence
  Synthetic Polypeptide
MIKIATRKYLGKQNVYDIGVERDHNFALKNGFIASNCLVDGNFDDAAWAQGRCDAIVRSGAGTVGRTQIARRSAAVWTDGCVEVLADSGNRRPSTRPRAKE

SEQ ID NO: 150 - DNA, 9048 bp, Artificial Sequence
  Synthetic Polynucleotide
cccggggttattaatagtaatcaattacggggtcattagttcatagcccatatatggagttccgcgttacataacttacggtaaatggcccgcctggctgaccgcccaacgacccccgcccattgacgtcaataatgacgtatgttcccatagtaacgccaatagggactttccattgacgtcaatgggtggagtatttacggtaaactgcccacttggcagtacatcaagtgtatcatatgccaagtacgccccctattgacgtcaatgacggtaaatggcccgcctggcattatgcccagtacatgaccttatgggactttcctacttggcagtacatctacgtattagtcatcgctattaccatggtgatgcggttttggcagtacatcaatgggcgtggatagcggtttgactcacggggatttccaagtctccaccccattgacgtcaatgggagtttgttttggcaccaaaatcaacgggactttccaaaatgtcgtaacaactccgccccattgacgcaaatgggcggtaggcgtgtacggtgggaggtctatataagcagagctctctggctaactgtcgggatcaacaagtttgtacaaaaaagcaggctccgaattcaccggtgccaccatgaccgagtacaagcccacggtgcgcctcgccacccgcgacgacgtccccagggccgtacgcaccctcgccgccgcgttcgccgactaccccgcctgcctttcatacgagaccgagatcctgactgtcgagtacggattgcttcctatcggcaaaatcgtggagaagaggattgaatgtaccgtctattcagtcgataataatgggaacatctacacacagcccgtggctcaatggcacgacagaggagagcaggaagtttttgaatactgtctcgaggacggatccctcatccgcgctactaaagatcataagtttatgaccgtggacggccagatgctgccaattgacgaaatttttgaacgagagctggatctgatgagagtcgacaaccttccaaactgattaattaagaattcgacccagctttcttgtacaaagtggttggtaagcctatccctaaccctctcctcggtctcgattctacgtagtaatgagctagcagtctcgaggttaacgaattccgccccccccctaacgttactggccgaagccgcttggaataaggccggtgtgcgcttgtctatatgttattttccaccatattgccgtcttttggcaatgtgagggcccggaaacctggccctgtcttcttgacgagcattcctaggggtctttcccctctcgccaaaggaatgcaaggtctgttgaatgtcgtgaaggaagcagttcctctggaagcttcttgaagacaaacaacgtctgtagcgaccctttgcaggcagcggaaccccccacctggcgacaggtgcccctgcggccaaaagccacgtgtataagatacacctgcaaaggcggcacaaccccagtgccacgttgtgagttggatagttgtggaaagagtcaaatggctctcctcaagcgtattcaacaaggggctgaaggatgcccagaaggtaccccattgtatgggatctgatctggggcctcggtgcacatgctttacatgtgtttagtcgaggttaaaaaaacgtctaggccccccgaaccacggggacgtggttttcctttgaaaaacacgataataccatggccatgagcgagctgattaaggagaacatgcacatgaagctgtacatggagggcaccgtggacaaccatcacttcaagtgcacatccgagggcgaaggcaagccctacgagggcacccagaccatgagaatcaaggtggtcgagggcggccctctccccttcgccttcgacatcctggctactagcttcctctacggcagcaagaccttcatcaaccacacccagggcatccccgacttcttcaagcagtccttccctgagggcttcacatgggagagagtcaccacatacgaagacgggggcgtgctgaccgctacccaggacaccagcctccaggacggctgcctcatctacaacgtcaagatcagaggggtgaacttcacatccaacggccctgtgatgcagaagaaaacactcggctgggaggccttcaccgagacgctgtaccccgctgacggcggcctggaaggcagaaacgacatggccctgaagctcgtgggcgggagccatctgatcgcaaacatcaagaccacatatagatccaagaaacccgctaagaacctcaagatgcctggcgtctactatgtggactacagactggaaagaatcaaggaggccaacaacgagacctacgtcgagcagcacgaggtggcagtggccagatactgcgacctccctagcaaactggggcacaagcttaattaacaccggtggcgcgttaagtcgacaatcaacctctggattacaaaatttgtgaaagattgactggtattcttaactatgttgctccttttacgctatgtggatacgctgctttaatgcctttgtatcatgctattgcttcccgtatggctttcattttctcctccttgtataaatcctggttgctgtctctttatgaggagttgtggcccgttgtcaggcaacgtggcgtggtgtgcactgtgtttgctgacgcaacccccactggttggggcattgccaccacctgtcagctcctttccgggactttcgctttccccctccctattgccacggcggaactcatcgccgcctgccttgcccgctgctggacaggggctcggctgttgggcactgacaattccgtggtgttgtcggggaaatcatcgtcctttccttggctgctcgcctgtgttgccacctggattctgcgcgggacgtccttctgctacgtcccttcggccctcaatccagcggaccttccttcccgcggcctgctgccggctctgcggcctcttccgcgtcttcgccttcgccctcagacgagtcggatctccctttgggccgcctccccgcgtcgactttaagaccaatgacttacaaggcagctgtagatcttagccactttttaaaagaaaaggggggactggaagggctaattcactcccaacgaagacaagatctgctttttgcttgtactgggtctctctggttagaccagatctgagcctgggagctctctggctaactagggaacccactgcttaagcctcaataaagcttgccttgagtgcttcaagtagtgtgtgcccgtctgttgtgtgactctggtaactagagatccctcagacccttttagtcagtgtggaaaatctctagcagtacgtatagtagttcatgtcatcttattattcagtatttataacttgcaaagaaatgaatatcagagagtgagaggaacttgtttattgcagcttataatggttacaaataaagcaatagcatcacaaatttcacaaataaagcatttttttcactgcattctagttgtggtttgtccaaactcatcaatgtatcttatcatgtctggctctagctatcccgcccctaactccgcccatcccgcccctaactccgcccagttccgcccattctccgccccatggctgactaattttttttatttatgcagaggccgaggccgcctcggcctctgagctattccagaagtagtgaggaggcttttttggaggcctagggacgtacccaattcgccctatagtgagtcgtattacgcgcgctcactggccgtcgttttacaacgtcgtgactgggaaaaccctggcgttacccaacttaatcgccttgcagcacatccccctttcgccagctggcgtaatagcgaagaggcccgcaccgatcgcccttcccaacagttgcgcagcctgaatggcgaatgggacgcgccctgtagcggcgcattaagcgcggcgggtgtggtggttacgcgcagcgtgaccgctacacttgccagcgccctagcgcccgctcctttcgctttcttcccttcctttctcgccacgttcgccggctttccccgtcaagctctaaatcgggggctccctttagggttccgatttagtgctttacggcacctcgaccccaaaaaacttgattagggtgatggttcacgtagtgggccatcgccctgatagacggtttttcgccctttgacgttggagtccacgttctttaatagtggactcttgttccaaactggaacaacactcaaccctatctcggtctattcttttgatttataagggattttgccgatttcggcctattggttaaaaaatgagctgatttaacaaaaatttaacgcgaattttaacaaaatattaacgcttacaatttaggtggcacttttcggggaaatgtgcgcggaacccctatttgtttatttttctaaatacattcaaatatgtatccgctcatgagacaataaccctgataaatgcttcaataatattgaaaaaggaagagtatgagtattcaacatttccgtgtcgcccttattcccttttttgcggcattttgccttcctgtttttgctcacccagaaacgctggtgaaagtaaaagatgctgaagatcagttgggtgcacgagtgggttacatcgaactggatctcaacagcggtaagatccttgagagttttcgccccgaagaacgttttccaatgatgagcacttttaaagttctgctatgtggcgcggtattatcccgtattgacgccgggcaagagcaactcggtcgccgcatacactattctcagaatgacttggttgagtactcaccagtcacagaaaagcatcttacggatggcatgacagtaagagaattatgcagtgctgccataaccatgagtgataacactgcggccaacttacttctgacaacgatcggaggaccgaaggagctaaccgcttttttgcacaacatgggggatcatgtaactcgccttgatcgttgggaaccggagctgaatgaagccataccaaacgacgagcgtgacaccacgatgcctgtagcaatggcaacaacgttgcgcaaactattaactggcgaactacttactctagcttcccggcaacaattaatagactggatggaggcggataaagttgcaggaccacttctgcgctcggcccttccggctggctggtttattgctgataaatctggagccggtgagcgtgggtctcgcggtatcattgcagcactggggccagatggtaagccctcccgtatcgtagttatctacacgacggggagtcaggcaactatggatgaacgaaatagacagatcgctgagataggtgcctcactgattaagcattggtaactgtcagaccaagtttactcatatatactttagattgatttaaaacttcatttttaatttaaaaggatctaggtgaagatcctttttgataatctcatgaccaaaatcccttaacgtgagttttcgttccactgagcgtcagaccccgtagaaaagatcaaaggatcttcttgagatcctttttttctgcgcgtaatctgctgcttgcaaacaaaaaaaccaccgctaccagcggtggtttgtttgccggatcaagagctaccaactctttttccgaaggtaactggcttcagcagagcgcagataccaaatactgttcttctagtgtagccgtagttaggccaccacttcaagaactctgtagcaccgcctacatacctcgctctgctaatcctgttaccagtggctgctgccagtggcgataagtcgtgtcttaccgggttggactcaagacgatagttaccggataaggcgcagcggtcgggctgaacggggggttcgtgcacacagcccagcttggagcgaacgacctacaccgaactgagatacctacagcgtgagctatgagaaagcgccacgcttcccgaagggagaaaggcggacaggtatccggtaagcggcagggtcggaacaggagagcgcacgagggagcttccagggggaaacgcctggtatctttatagtcctgtcgggtttcgccacctctgacttgagcgtcgatttttgtgatgctcgtcaggggggcggagcctatggaaaaacgccagcaacgcggcctttttacggttcctggccttttgctggccttttgctcacatgttctttcctgcgttatcccctgattctgtggataaccgtattaccgcctttgagtgagctgataccgctcgccgcagccgaacgaccgagcgcagcgagtcagtgagcgaggaagcggaagagcgcccaatacgcaaaccgcctctccccgcgcgttggccgattcattaatgcagctggcacgacaggtttcccgactggaaagcgggcagtgagcgcaacgcaattaatgtgagttagctcactcattaggcaccccaggctttacactttatgcttccggctcgtatgttgtgtggaattgtgagcggataacaatttcacacaggaaacagctatgaccatgattacgccaagcgcgcaattaaccctcactaaagggaacaaaagctggagctgcaagcttaatgtagtcttatgcaatactcttgtagtcttgcaacatggtaacgatgagttagcaacatgccttacaaggagagaaaaagcaccgtgcatgccgattggtggaagtaaggtggtacgatcgtgccttattaggaaggcaacagacgggtctgacatggattggacgaaccactgaattgccgcattgcagagatattgtatttaagtgcctagctcgatacataaacgggtctctctggttagaccagatctgagcctgggagctctctggctaactagggaacccactgcttaagcctcaataaagcttgccttgagtgcttcaagtagtgtgtgcccgtctgttgtgtgactctggtaactagagatccctcagacccttttagtcagtgtggaaaatctctagcagtggcgcccgaacagggacttgaaagcgaaagggaaaccagaggagctctctcgacgcaggactcggcttgctgaagcgcgcacggcaagaggcgaggggcggcgactggtgagtacgccaaaaattttgactagcggaggctagaaggagagagatgggtgcgagagcgtcagtattaagcgggggagaattagatcgcgatgggaaaaaattcggttaaggccagggggaaagaaaaaatataaattaaaacatatagtatgggcaagcagggagctagaacgattcgcagttaatcctggcctgttagaaacatcagaaggctgtagacaaatactgggacagctacaaccatcccttcagacaggatcagaagaacttagatcattatataatacagtagcaaccctctattgtgtgcatcaaaggatagagataaaagacaccaaggaagctttagacaagatagaggaagagcaaaacaaaagtaagaccaccgcacagcaagcggccgctgatcttcagacctggaggaggagatatgagggacaattggagaagtgaattatataaatataaagtagtaaaaattgaaccattaggagtagcacccaccaaggcaaagagaagagtggtgcagagagaaaaaagagcagtgggaataggagctttgttccttgggttcttgggagcagcaggaagcactatgggcgcagcgtcaatgacgctgacggtacaggccagacaattattgtctggtatagtgcagcagcagaacaatttgctgagggctattgaggcgcaacagcatctgttgcaactcacagtctggggcatcaagcagctccaggcaagaatcctggctgtggaaagatacctaaaggatcaacagctcctggggatttggggttgctctggaaaactcatttgcaccactgctgtgccttggaatgctagttggagtaataaatctctggaacagatttggaatcacacgacctggatggagtgggacagagaaattaacaattacacaagcttaatacactccttaattgaagaatcgcaaaaccagcaagaaaagaatgaacaagaattattggaattagataaatgggcaagtttgtggaattggtttaacataacaaattggctgtggtatataaaattattcataatgatagtaggaggcttggtaggtttaagaatagtttttgctgtactttctatagtgaatagagttaggcagggatattcaccattatcgtttcagacccacctcccaaccccgaggggacccttgcgccttttccaaggcagccctgggtttgcgcagggacgcggctgctctgggcgtggttccgggaaacgcagcggcgccgaccctgggtctcgcacattcttcacgtccgttcgcagcgtcacccggatcttcgccgctacccttgtgggccccccggcgacgcttcctgctccgcccctaagtcgggaaggttccttgcggttcgcggcgtgccggacgtgacaaacggaagccgcacgtctcactagtaccctcgcagacggacagcgccagggagcaatggcagcgcgccgaccgcgatgggctgtggccaatagcggctgctcagcagggcgcgccgagagcagcggccgggaaggggcggtgcgggaggcggggtgtggggcggtagtgtgggccctgttcctgcccgcgcggtgttccgcattctgcaagcctccggagcgcacgtcggcagtcggctccctcgttgaccgaatcaccgacctctctccccagggggtacccagctgtctagagaattctagatcttgagacaaatggcagtattcatccacaattttaaaagaaaaggggggattggggggtacagtgcaggggaaagaatagtagacataatagcaacagacatacaaactaaagaattacaaaaacaaattacaaaaattcaaaattttcgggtttattacagggacagcagagatccactttggcgccggctcgaggggg

SEQ ID NO: 151 - protein, 134 aa, Artificial Sequence
  Synthetic Polypeptide
MTEYKPTVRLATRDDVPRAVRTLAAAFADYPACLSYETEILTVEYGLLPIGKIVEKRIECTVYSVDNNGNIYTQPVAQWHDRGEQEVFEYCLEDGSLIRATKDHKFMTVDGQMLPIDEIFERELDLMRVDNLPN

SEQ ID NO: 152 - DNA, 9264 bp, Artificial Sequence
  Synthetic Polynucleotide
cccggggttattaatagtaatcaattacggggtcattagttcatagcccatatatggagttccgcgttacataacttacggtaaatggcccgcctggctgaccgcccaacgacccccgcccattgacgtcaataatgacgtatgttcccatagtaacgccaatagggactttccattgacgtcaatgggtggagtatttacggtaaactgcccacttggcagtacatcaagtgtatcatatgccaagtacgccccctattgacgtcaatgacggtaaatggcccgcctggcattatgcccagtacatgaccttatgggactttcctacttggcagtacatctacgtattagtcatcgctattaccatggtgatgcggttttggcagtacatcaatgggcgtggatagcggtttgactcacggggatttccaagtctccaccccattgacgtcaatgggagtttgttttggcaccaaaatcaacgggactttccaaaatgtcgtaacaactccgccccattgacgcaaatgggcggtaggcgtgtacggtgggaggtctatataagcagagctctctggctaactgtcgggatcaacaagtttgtacaaaaaagcaggctccgaattcaccggtgccgccaccatgattaagatcgctacgcggaagtacctggggaaacagaacgtctacgacataggtgtggagcgcgatcacaactttgctctgaaaaatggatttatcgccagcaactgcacgcgccacaccgtcgatccggaccgccacatcgagcgggtcaccgagctgcaagaactcttcctcacgcgcgtcgggctcgacatcggcaaggtgtgggtcgcggacgacggcgccgcggtggcggtctggaccacgccggagagcgtcgaagcgggggcggtgttcgccgagatcggcccgcgcatggccgagttgagcggttcccggctggccgcgcagcaacagatggaaggcctcctggcgccgcaccggcccaaggagcccgcgtggttcctggccaccgtcggcgtctcgcccgaccaccagggcaagggtctgggcagcgccgtcgtgctccccggagtggaggcggccgagcgcgccggggtgcccgccttcctggagacctccgcgccccgcaacctccccttctacgagcggctcggcttcaccgtcaccgccgacgtcgaggtgcccgaaggaccgcgcacctggtgcatgacccgcaagcccggtgcctgattaattaagaattcgacccagctttcttgtacaaagtggttggtaagcctatccctaaccctctcctcggtctcgattctacgtagtaatgagctagcagtctcgaggttaacgaattccgccccccccctaacgttactggccgaagccgcttggaataaggccggtgtgcgcttgtctatatgttattttccaccatattgccgtcttttggcaatgtgagggcccggaaacctggccctgtcttcttgacgagcattcctaggggtctttcccctctcgccaaaggaatgcaaggtctgttgaatgtcgtgaaggaagcagttcctctggaagcttcttgaagacaaacaacgtctgtagcgaccctttgcaggcagcggaaccccccacctggcgacaggtgcccctgcggccaaaagccacgtgtataagatacacctgcaaaggcggcacaaccccagtgccacgttgtgagttggatagttgtggaaagagtcaaatggctctcctcaagcgtattcaacaaggggctgaaggatgcccagaaggtaccccattgtatgggatctgatctggggcctcggtgcacatgctttacatgtgtttagtcgaggttaaaaaaacgtctaggccccccgaaccacggggacgtggttttcctttgaaaaacacgataataccatggtgagcaagggcgaggaggataacatggccatcatcaaggagttcatgcgcttcaaggtgcacatggagggctccgtgaacggccacgagttcgagatcgagggcgagggcgagggccgcccctacgagggcacccagaccgccaagctgaaggtgaccaagggtggccccctgcccttcgcctgggacatcctgtcccctcagttcatgtacggctccaaggcctacgtgaagcaccccgccgacatccccgactacttgaagctgtccttccccgagggcttcaagtgggagcgcgtgatgaacttcgaggacggcggcgtggtgaccgtgacccaggactcctccctgcaggacggcgagttcatctacaaggtgaagctgcgcggcaccaacttcccctccgacggccccgtaatgcagaagaagaccatgggctgggaggcctcctccgagcggatgtaccccgaggacggcgccctgaagggcgagatcaagcagaggctgaagctgaaggacggcggccactacgacgctgaggtcaagaccacctacaaggccaagaagcccgtgcagctgcccggcgcctacaacgtcaacatcaagttggacatcacctcccacaacgaggactacaccatcgtggaacagtacgaacgcgccgagggccgccactccaccggcggcatggacgagctgtacaagtaacaccggtggcgcgttaagtcgacaatcaacctctggattacaaaatttgtgaaagattgactggtattcttaactatgttgctccttttacgctatgtggatacgctgctttaatgcctttgtatcatgctattgcttcccgtatggctttcattttctcctccttgtataaatcctggttgctgtctctttatgaggagttgtggcccgttgtcaggcaacgtggcgtggtgtgcactgtgtttgctgacgcaacccccactggttggggcattgccaccacctgtcagctcctttccgggactttcgctttccccctccctattgccacggcggaactcatcgccgcctgccttgcccgctgctggacaggggctcggctgttgggcactgacaattccgtggtgttgtcggggaaatcatcgtcctttccttggctgctcgcctgtgttgccacctggattctgcgcgggacgtccttctgctacgtcccttcggccctcaatccagcggaccttccttcccgcggcctgctgccggctctgcggcctcttccgcgtcttcgccttcgccctcagacgagtcggatctccctttgggccgcctccccgcgtcgactttaagaccaatgacttacaaggcagctgtagatcttagccactttttaaaagaaaaggggggactggaagggctaattcactcccaacgaagacaagatctgctttttgcttgtactgggtctctctggttagaccagatctgagcctgggagctctctggctaactagggaacccactgcttaagcctcaataaagcttgccttgagtgcttcaagtagtgtgtgcccgtctgttgtgtgactctggtaactagagatccctcagacccttttagtcagtgtggaaaatctctagcagtacgtatagtagttcatgtcatcttattattcagtatttataacttgcaaagaaatgaatatcagagagtgagaggaacttgtttattgcagcttataatggttacaaataaagcaatagcatcacaaatttcacaaataaagcatttttttcactgcattctagttgtggtttgtccaaactcatcaatgtatcttatcatgtctggctctagctatcccgcccctaactccgcccatcccgcccctaactccgcccagttccgcccattctccgccccatggctgactaattttttttatttatgcagaggccgaggccgcctcggcctctgagctattccagaagtagtgaggaggcttttttggaggcctagggacgtacccaattcgccctatagtgagtcgtattacgcgcgctcactggccgtcgttttacaacgtcgtgactgggaaaaccctggcgttacccaacttaatcgccttgcagcacatccccctttcgccagctggcgtaatagcgaagaggcccgcaccgatcgcccttcccaacagttgcgcagcctgaatggcgaatgggacgcgccctgtagcggcgcattaagcgcggcgggtgtggtggttacgcgcagcgtgaccgctacacttgccagcgccctagcgcccgctcctttcgctttcttcccttcctttctcgccacgttcgccggctttccccgtcaagctctaaatcgggggctccctttagggttccgatttagtgctttacggcacctcgaccccaaaaaacttgattagggtgatggttcacgtagtgggccatcgccctgatagacggtttttcgccctttgacgttggagtccacgttctttaatagtggactcttgttccaaactggaacaacactcaaccctatctcggtctattcttttgatttataagggattttgccgatttcggcctattggttaaaaaatgagctgatttaacaaaaatttaacgcgaattttaacaaaatattaacgcttacaatttaggtggcacttttcggggaaatgtgcgcggaacccctatttgtttatttttctaaatacattcaaatatgtatccgctcatgagacaataaccctgataaatgcttcaataatattgaaaaaggaagagtatgagtattcaacatttccgtgtcgcccttattcccttttttgcggcattttgccttcctgtttttgctcacccagaaacgctggtgaaagtaaaagatgctgaagatcagttgggtgcacgagtgggttacatcgaactggatctcaacagcggtaagatccttgagagttttcgccccgaagaacgttttccaatgatgagcacttttaaagttctgctatgtggcgcggtattatcccgtattgacgccgggcaagagcaactcggtcgccgcatacactattctcagaatgacttggttgagtactcaccagtcacagaaaagcatcttacggatggcatgacagtaagagaattatgcagtgctgccataaccatgagtgataacactgcggccaacttacttctgacaacgatcggaggaccgaaggagctaaccgcttttttgcacaacatgggggatcatgtaactcgccttgatcgttgggaaccggagctgaatgaagccataccaaacgacgagcgtgacaccacgatgcctgtagcaatggcaacaacgttgcgcaaactattaactggcgaactacttactctagcttcccggcaacaattaatagactggatggaggcggataaagttgcaggaccacttctgcgctcggcccttccggctggctggtttattgctgataaatctggagccggtgagcgtgggtctcgcggtatcattgcagcactggggccagatggtaagccctcccgtatcgtagttatctacacgacggggagtcaggcaactatggatgaacgaaatagacagatcgctgagataggtgcctcactgattaagcattggtaactgtcagaccaagtttactcatatatactttagattgatttaaaacttcatttttaatttaaaaggatctaggtgaagatcctttttgataatctcatgaccaaaatcccttaacgtgagttttcgttccactgagcgtcagaccccgtagaaaagatcaaaggatcttcttgagatcctttttttctgcgcgtaatctgctgcttgcaaacaaaaaaaccaccgctaccagcggtggtttgtttgccggatcaagagctaccaactctttttccgaaggtaactggcttcagcagagcgcagataccaaatactgttcttctagtgtagccgtagttaggccaccacttcaagaactctgtagcaccgcctacatacctcgctctgctaatcctgttaccagtggctgctgccagtggcgataagtcgtgtcttaccgggttggactcaagacgatagttaccggataaggcgcagcggtcgggctgaacggggggttcgtgcacacagcccagcttggagcgaacgacctacaccgaactgagatacctacagcgtgagctatgagaaagcgccacgcttcccgaagggagaaaggcggacaggtatccggtaagcggcagggtcggaacaggagagcgcacgagggagcttccagggggaaacgcctggtatctttatagtcctgtcgggtttcgccacctctgacttgagcgtcgatttttgtgatgctcgtcaggggggcggagcctatggaaaaacgccagcaacgcggcctttttacggttcctggccttttgctggccttttgctcacatgttctttcctgcgttatcccctgattctgtggataaccgtattaccgcctttgagtgagctgataccgctcgccgcagccgaacgaccgagcgcagcgagtcagtgagcgaggaagcggaagagcgcccaatacgcaaaccgcctctccccgcgcgttggccgattcattaatgcagctggcacgacaggtttcccgactggaaagcgggcagtgagcgcaacgcaattaatgtgagttagctcactcattaggcaccccaggctttacactttatgcttccggctcgtatgttgtgtggaattgtgagcggataacaatttcacacaggaaacagctatgaccatgattacgccaagcgcgcaattaaccctcactaaagggaacaaaagctggagctgcaagcttaatgtagtcttatgcaatactcttgtagtcttgcaacatggtaacgatgagttagcaacatgccttacaaggagagaaaaagcaccgtgcatgccgattggtggaagtaaggtggtacgatcgtgccttattaggaaggcaacagacgggtctgacatggattggacgaaccactgaattgccgcattgcagagatattgtatttaagtgcctagctcgatacataaacgggtctctctggttagaccagatctgagcctgggagctctctggctaactagggaacccactgcttaagcctcaataaagcttgccttgagtgcttcaagtagtgtgtgcccgtctgttgtgtgactctggtaactagagatccctcagacccttttagtcagtgtggaaaatctctagcagtggcgcccgaacagggacttgaaagcgaaagggaaaccagaggagctctctcgacgcaggactcggcttgctgaagcgcgcacggcaagaggcgaggggcggcgactggtgagtacgccaaaaattttgactagcggaggctagaaggagagagatgggtgcgagagcgtcagtattaagcgggggagaattagatcgcgatgggaaaaaattcggttaaggccagggggaaagaaaaaatataaattaaaacatatagtatgggcaagcagggagctagaacgattcgcagttaatcctggcctgttagaaacatcagaaggctgtagacaaatactgggacagctacaaccatcccttcagacaggatcagaagaacttagatcattatataatacagtagcaaccctctattgtgtgcatcaaaggatagagataaaagacaccaaggaagctttagacaagatagaggaagagcaaaacaaaagtaagaccaccgcacagcaagcggccgctgatcttcagacctggaggaggagatatgagggacaattggagaagtgaattatataaatataaagtagtaaaaattgaaccattaggagtagcacccaccaaggcaaagagaagagtggtgcagagagaaaaaagagcagtgggaataggagctttgttccttgggttcttgggagcagcaggaagcactatgggcgcagcgtcaatgacgctgacggtacaggccagacaattattgtctggtatagtgcagcagcagaacaatttgctgagggctattgaggcgcaacagcatctgttgcaactcacagtctggggcatcaagcagctccaggcaagaatcctggctgtggaaagatacctaaaggatcaacagctcctggggatttggggttgctctggaaaactcatttgcaccactgctgtgccttggaatgctagttggagtaataaatctctggaacagatttggaatcacacgacctggatggagtgggacagagaaattaacaattacacaagcttaatacactccttaattgaagaatcgcaaaaccagcaagaaaagaatgaacaagaattattggaattagataaatgggcaagtttgtggaattggtttaacataacaaattggctgtggtatataaaattattcataatgatagtaggaggcttggtaggtttaagaatagtttttgctgtactttctatagtgaatagagttaggcagggatattcaccattatcgtttcagacccacctcccaaccccgaggggacccttgcgccttttccaaggcagccctgggtttgcgcagggacgcggctgctctgggcgtggttccgggaaacgcagcggcgccgaccctgggtctcgcacattcttcacgtccgttcgcagcgtcacccggatcttcgccgctacccttgtgggccccccggcgacgcttcctgctccgcccctaagtcgggaaggttccttgcggttcgcggcgtgccggacgtgacaaacggaagccgcacgtctcactagtaccctcgcagacggacagcgccagggagcaatggcagcgcgccgaccgcgatgggctgtggccaatagcggctgctcagcagggcgcgccgagagcagcggccgggaaggggcggtgcgggaggcggggtgtggggcggtagtgtgggccctgttcctgcccgcgcggtgttccgcattctgcaagcctccggagcgcacgtcggcagtcggctccctcgttgaccgaatcaccgacctctctccccagggggtacccagctgtctagagaattctagatcttgagacaaatggcagtattcatccacaattttaaaagaaaaggggggattggggggtacagtgcaggggaaagaatagtagacataatagcaacagacatacaaactaaagaattacaaaaacaaattacaaaaattcaaaattttcgggtttattacagggacagcagagatccactttggcgccggctcgaggggg

SEQ ID NO: 153 - protein, 204 aa, Artificial Sequence
  Synthetic Polypeptide
MIKIATRKYLGKQNVYDIGVERDHNFALKNGFIASNCTRHTVDPDRHIERVTELQELFLTRVGLDIGKVWVADDGAAVAVWTTPESVEAGAVFAEIGPRMAELSGSRLAAQQQMEGLLAPHRPKEPAWFLATVGVSPDHQGKGLGSAVVLPGVEAAERAGVPAFLETSAPRNLPFYERLGFTVTADVEVPEGPRTWCMTRKPGA

SEQ ID NO: 154 - DNA, 9204 bp, Artificial Sequence
  Synthetic Polynucleotide
cccggggttattaatagtaatcaattacggggtcattagttcatagcccatatatggagttccgcgttacataacttacggtaaatggcccgcctggctgaccgcccaacgacccccgcccattgacgtcaataatgacgtatgttcccatagtaacgccaatagggactttccattgacgtcaatgggtggagtatttacggtaaactgcccacttggcagtacatcaagtgtatcatatgccaagtacgccccctattgacgtcaatgacggtaaatggcccgcctggcattatgcccagtacatgaccttatgggactttcctacttggcagtacatctacgtattagtcatcgctattaccatggtgatgcggttttggcagtacatcaatgggcgtggatagcggtttgactcacggggatttccaagtctccaccccattgacgtcaatgggagtttgttttggcaccaaaatcaacgggactttccaaaatgtcgtaacaactccgccccattgacgcaaatgggcggtaggcgtgtacggtgggaggtctatataagcagagctctctggctaactgtcgggatcaacaagtttgtacaaaaaagcaggctccgaattcaccggtgccaccatgaccgagtacaagcccacggtgcgcctcgccacccgcgacgacgtccccagggccgtacgcaccctcgccgccgcgttcgccgactaccccgccacgcgccacaccgtcgatccggaccgccacatcgagcgggtcaccgagctgcaagaactcttcctcacgcgcgtcgggctcgacatcggcaaggtgtgggtcgcggacgacggcgccgcggtggcggtctggaccacgccggagagcgtcgaagcgtgcctttcatacgagaccgagatcctgactgtcgagtacggattgcttcctatcggcaaaatcgtggagaagaggattgaatgtaccgtctattcagtcgataataatgggaacatctacacacagcccgtggctcaatggcacgacagaggagagcaggaagtttttgaatactgtctcgaggacggatccctcatccgcgctactaaagatcataagtttatgaccgtggacggccagatgctgccaattgacgaaatttttgaacgagagctggatctgatgagagtcgacaaccttccaaactgattaattaagaattcgacccagctttcttgtacaaagtggttggtaagcctatccctaaccctctcctcggtctcgattctacgtagtaatgagctagcagtctcgaggttaacgaattccgccccccccctaacgttactggccgaagccgcttggaataaggccggtgtgcgcttgtctatatgttattttccaccatattgccgtcttttggcaatgtgagggcccggaaacctggccctgtcttcttgacgagcattcctaggggtctttcccctctcgccaaaggaatgcaaggtctgttgaatgtcgtgaaggaagcagttcctctggaagcttcttgaagacaaacaacgtctgtagcgaccctttgcaggcagcggaaccccccacctggcgacaggtgcccctgcggccaaaagccacgtgtataagatacacctgcaaaggcggcacaaccccagtgccacgttgtgagttggatagttgtggaaagagtcaaatggctctcctcaagcgtattcaacaaggggctgaaggatgcccagaaggtaccccattgtatgggatctgatctggggcctcggtgcacatgctttacatgtgtttagtcgaggttaaaaaaacgtctaggccccccgaaccacggggacgtggttttcctttgaaaaacacgataataccatggccatgagcgagctgattaaggagaacatgcacatgaagctgtacatggagggcaccgtggacaaccatcacttcaagtgcacatccgagggcgaaggcaagccctacgagggcacccagaccatgagaatcaaggtggtcgagggcggccctctccccttcgccttcgacatcctggctactagcttcctctacggcagcaagaccttcatcaaccacacccagggcatccccgacttcttcaagcagtccttccctgagggcttcacatgggagagagtcaccacatacgaagacgggggcgtgctgaccgctacccaggacaccagcctccaggacggctgcctcatctacaacgtcaagatcagaggggtgaacttcacatccaacggccctgtgatgcagaagaaaacactcggctgggaggccttcaccgagacgctgtaccccgctgacggcggcctggaaggcagaaacgacatggccctgaagctcgtgggcgggagccatctgatcgcaaacatcaagaccacatatagatccaagaaacccgctaagaacctcaagatgcctggcgtctactatgtggactacagactggaaagaatcaaggaggccaacaacgagacctacgtcgagcagcacgaggtggcagtggccagatactgcgacctccctagcaaactggggcacaagcttaattaacaccggtggcgcgttaagtcgacaatcaacctctggattacaaaatttgtgaaagattgactggtattcttaactatgttgctccttttacgctatgtggatacgctgctttaatgcctttgtatcatgctattgcttcccgtatggctttcattttctcctccttgtataaatcctggttgctgtctctttatgaggagttgtggcccgttgtcaggcaacgtggcgtggtgtgcactgtgtttgctgacgcaacccccactggttggggcattgccaccacctgtcagctcctttccgggactttcgctttccccctccctattgccacggcggaactcatcgccgcctgccttgcccgctgctggacaggggctcggctgttgggcactgacaattccgtggtgttgtcggggaaatcatcgtcctttccttggctgctcgcctgtgttgccacctggattctgcgcgggacgtccttctgctacgtcccttcggccctcaatccagcggaccttccttcccgcggcctgctgccggctctgcggcctcttccgcgtcttcgccttcgccctcagacgagtcggatctccctttgggccgcctccccgcgtcgactttaagaccaatgacttacaaggcagctgtagatcttagccactttttaaaagaaaaggggggactggaagggctaattcactcccaacgaagacaagatctgctttttgcttgtactgggtctctctggttagaccagatctgagcctgggagctctctggctaactagggaacccactgcttaagcctcaataaagcttgccttgagtgcttcaagtagtgtgtgcccgtctgttgtgtgactctggtaactagagatccctcagacccttttagtcagtgtggaaaatctctagcagtacgtatagtagttcatgtcatcttattattcagtatttataacttgcaaagaaatgaatatcagagagtgagaggaacttgtttattgcagcttataatggttacaaataaagcaatagcatcacaaatttcacaaataaagcatttttttcactgcattctagttgtggtttgtccaaactcatcaatgtatcttatcatgtctggctctagctatcccgcccctaactccgcccatcccgcccctaactccgcccagttccgcccattctccgccccatggctgactaattttttttatttatgcagaggccgaggccgcctcggcctctgagctattccagaagtagtgaggaggcttttttggaggcctagggacgtacccaattcgccctatagtgagtcgtattacgcgcgctcactggccgtcgttttacaacgtcgtgactgggaaaaccctggcgttacccaacttaatcgccttgcagcacatccccctttcgccagctggcgtaatagcgaagaggcccgcaccgatcgcccttcccaacagttgcgcagcctgaatggcgaatgggacgcgccctgtagcggcgcattaagcgcggcgggtgtggtggttacgcgcagcgtgaccgctacacttgccagcgccctagcgcccgctcctttcgctttcttcccttcctttctcgccacgttcgccggctttccccgtcaagctctaaatcgggggctccctttagggttccgatttagtgctttacggcacctcgaccccaaaaaacttgattagggtgatggttcacgtagtgggccatcgccctgatagacggtttttcgccctttgacgttggagtccacgttctttaatagtggactcttgttccaaactggaacaacactcaaccctatctcggtctattcttttgatttataagggattttgccgatttcggcctattggttaaaaaatgagctgatttaacaaaaatttaacgcgaattttaacaaaatattaacgcttacaatttaggtggcacttttcggggaaatgtgcgcggaacccctatttgtttatttttctaaatacattcaaatatgtatccgctcatgagacaataaccctgataaatgcttcaataatattgaaaaaggaagagtatgagtattcaacatttccgtgtcgcccttattcccttttttgcggcattttgccttcctgtttttgctcacccagaaacgctggtgaaagtaaaagatgctgaagatcagttgggtgcacgagtgggttacatcgaactggatctcaacagcggtaagatccttgagagttttcgccccgaagaacgttttccaatgatgagcacttttaaagttctgctatgtggcgcggtattatcccgtattgacgccgggcaagagcaactcggtcgccgcatacactattctcagaatgacttggttgagtactcaccagtcacagaaaagcatcttacggatggcatgacagtaagagaattatgcagtgctgccataaccatgagtgataacactgcggccaacttacttctgacaacgatcggaggaccgaaggagctaaccgcttttttgcacaacatgggggatcatgtaactcgccttgatcgttgggaaccggagctgaatgaagccataccaaacgacgagcgtgacaccacgatgcctgtagcaatggcaacaacgttgcgcaaactattaactggcgaactacttactctagcttcccggcaacaattaatagactggatggaggcggataaagttgcaggaccacttctgcgctcggcccttccggctggctggtttattgctgataaatctggagccggtgagcgtgggtctcgcggtatcattgcagcactggggccagatggtaagccctcccgtatcgtagttatctacacgacggggagtcaggcaactatggatgaacgaaatagacagatcgctgagataggtgcctcactgattaagcattggtaactgtcagaccaagtttactcatatatactttagattgatttaaaacttcatttttaatttaaaaggatctaggtgaagatcctttttgataatctcatgaccaaaatcccttaacgtgagttttcgttccactgagcgtcagaccccgtagaaaagatcaaaggatcttcttgagatcctttttttctgcgcgtaatctgctgcttgcaaacaaaaaaaccaccgctaccagcggtggtttgtttgccggatcaagagctaccaactctttttccgaaggtaactggcttcagcagagcgcagataccaaatactgttcttctagtgtagccgtagttaggccaccacttcaagaactctgtagcaccgcctacatacctcgctctgctaatcctgttaccagtggctgctgccagtggcgataagtcgtgtcttaccgggttggactcaagacgatagttaccggataaggcgcagcggtcgggctgaacggggggttcgtgcacacagcccagcttggagcgaacgacctacaccgaactgagatacctacagcgtgagctatgagaaagcgccacgcttcccgaagggagaaaggcggacaggtatccggtaagcggcagggtcggaacaggagagcgcacgagggagcttccagggggaaacgcctggtatctttatagtcctgtcgggtttcgccacctctgacttgagcgtcgatttttgtgatgctcgtcaggggggcggagcctatggaaaaacgccagcaacgcggcctttttacggttcctggccttttgctggccttttgctcacatgttctttcctgcgttatcccctgattctgtggataaccgtattaccgcctttgagtgagctgataccgctcgccgcagccgaacgaccgagcgcagcgagtcagtgagcgaggaagcggaagagcgcccaatacgcaaaccgcctctccccgcgcgttggccgattcattaatgcagctggcacgacaggtttcccgactggaaagcgggcagtgagcgcaacgcaattaatgtgagttagctcactcattaggcaccccaggctttacactttatgcttccggctcgtatgttgtgtggaattgtgagcggataacaatttcacacaggaaacagctatgaccatgattacgccaagcgcgcaattaaccctcactaaagggaacaaaagctggagctgcaagcttaatgtagtcttatgcaatactcttgtagtcttgcaacatggtaacgatgagttagcaacatgccttacaaggagagaaaaagcaccgtgcatgccgattggtggaagtaaggtggtacgatcgtgccttattaggaaggcaacagacgggtctgacatggattggacgaaccactgaattgccgcattgcagagatattgtatttaagtgcctagctcgatacataaacgggtctctctggttagaccagatctgagcctgggagctctctggctaactagggaacccactgcttaagcctcaataaagcttgccttgagtgcttcaagtagtgtgtgcccgtctgttgtgtgactctggtaactagagatccctcagacccttttagtcagtgtggaaaatctctagcagtggcgcccgaacagggacttgaaagcgaaagggaaaccagaggagctctctcgacgcaggactcggcttgctgaagcgcgcacggcaagaggcgaggggcggcgactggtgagtacgccaaaaattttgactagcggaggctagaaggagagagatgggtgcgagagcgtcagtattaagcgggggagaattagatcgcgatgggaaaaaattcggttaaggccagggggaaagaaaaaatataaattaaaacatatagtatgggcaagcagggagctagaacgattcgcagttaatcctggcctgttagaaacatcagaaggctgtagacaaatactgggacagctacaaccatcccttcagacaggatcagaagaacttagatcattatataatacagtagcaaccctctattgtgtgcatcaaaggatagagataaaagacaccaaggaagctttagacaagatagaggaagagcaaaacaaaagtaagaccaccgcacagcaagcggccgctgatcttcagacctggaggaggagatatgagggacaattggagaagtgaattatataaatataaagtagtaaaaattgaaccattaggagtagcacccaccaaggcaaagagaagagtggtgcagagagaaaaaagagcagtgggaataggagctttgttccttgggttcttgggagcagcaggaagcactatgggcgcagcgtcaatgacgctgacggtacaggccagacaattattgtctggtatagtgcagcagcagaacaatttgctgagggctattgaggcgcaacagcatctgttgcaactcacagtctggggcatcaagcagctccaggcaagaatcctggctgtggaaagatacctaaaggatcaacagctcctggggatttggggttgctctggaaaactcatttgcaccactgctgtgccttggaatgctagttggagtaataaatctctggaacagatttggaatcacacgacctggatggagtgggacagagaaattaacaattacacaagcttaatacactccttaattgaagaatcgcaaaaccagcaagaaaagaatgaacaagaattattggaattagataaatgggcaagtttgtggaattggtttaacataacaaattggctgtggtatataaaattattcataatgatagtaggaggcttggtaggtttaagaatagtttttgctgtactttctatagtgaatagagttaggcagggatattcaccattatcgtttcagacccacctcccaaccccgaggggacccttgcgccttttccaaggcagccctgggtttgcgcagggacgcggctgctctgggcgtggttccgggaaacgcagcggcgccgaccctgggtctcgcacattcttcacgtccgttcgcagcgtcacccggatcttcgccgctacccttgtgggccccccggcgacgcttcctgctccgcccctaagtcgggaaggttccttgcggttcgcggcgtgccggacgtgacaaacggaagccgcacgtctcactagtaccctcgcagacggacagcgccagggagcaatggcagcgcgccgaccgcgatgggctgtggccaatagcggctgctcagcagggcgcgccgagagcagcggccgggaaggggcggtgcgggaggcggggtgtggggcggtagtgtgggccctgttcctgcccgcgcggtgttccgcattctgcaagcctccggagcgcacgtcggcagtcggctccctcgttgaccgaatcaccgacctctctccccagggggtacccagctgtctagagaattctagatcttgagacaaatggcagtattcatccacaattttaaaagaaaaggggggattggggggtacagtgcaggggaaagaatagtagacataatagcaacagacatacaaactaaagaattacaaaaacaaattacaaaaattcaaaattttcgggtttattacagggacagcagagatccactttggcgccggctcgaggggg

SEQ ID NO: 155 - protein, 186 aa, Artificial Sequence
  Synthetic Polypeptide
MTEYKPTVRLATRDDVPRAVRTLAAAFADYPATRHTVDPDRHIERVTELQELFLTRVGLDIGKVWVADDGAAVAVWTTPESVEACLSYETEILTVEYGLLPIGKIVEKRIECTVYSVDNNGNIYTQPVAQWHDRGEQEVFEYCLEDGSLIRATKDHKFMTVDGQMLPIDEIFERELDLMRVDNLPN

SEQ ID NO: 156 - DNA, 9108 bp, Artificial Sequence
  Synthetic Polynucleotide
cccggggttattaatagtaatcaattacggggtcattagttcatagcccatatatggagttccgcgttacataacttacggtaaatggcccgcctggctgaccgcccaacgacccccgcccattgacgtcaataatgacgtatgttcccatagtaacgccaatagggactttccattgacgtcaatgggtggagtatttacggtaaactgcccacttggcagtacatcaagtgtatcatatgccaagtacgccccctattgacgtcaatgacggtaaatggcccgcctggcattatgcccagtacatgaccttatgggactttcctacttggcagtacatctacgtattagtcatcgctattaccatggtgatgcggttttggcagtacatcaatgggcgtggatagcggtttgactcacggggatttccaagtctccaccccattgacgtcaatgggagtttgttttggcaccaaaatcaacgggactttccaaaatgtcgtaacaactccgccccattgacgcaaatgggcggtaggcgtgtacggtgggaggtctatataagcagagctctctggctaactgtcgggatcaacaagtttgtacaaaaaagcaggctccgaattcaccggtgccgccaccatgattaagatcgctacgcggaagtacctggggaaacagaacgtctacgacataggtgtggagcgcgatcacaactttgctctgaaaaatggatttatcgccagcaactgcggggcggtgttcgccgagatcggcccgcgcatggccgagttgagcggttcccggctggccgcgcagcaacagatggaaggcctcctggcgccgcaccggcccaaggagcccgcgtggttcctggccaccgtcggcgtctcgcccgaccaccagggcaagggtctgggcagcgccgtcgtgctccccggagtggaggcggccgagcgcgccggggtgcccgccttcctggagacctccgcgccccgcaacctccccttctacgagcggctcggcttcaccgtcaccgccgacgtcgaggtgcccgaaggaccgcgcacctggtgcatgacccgcaagcccggtgcctgattaattaagaattcgacccagctttcttgtacaaagtggttggtaagcctatccctaaccctctcctcggtctcgattctacgtagtaatgagctagcagtctcgaggttaacgaattccgccccccccctaacgttactggccgaagccgcttggaataaggccggtgtgcgcttgtctatatgttattttccaccatattgccgtcttttggcaatgtgagggcccggaaacctggccctgtcttcttgacgagcattcctaggggtctttcccctctcgccaaaggaatgcaaggtctgttgaatgtcgtgaaggaagcagttcctctggaagcttcttgaagacaaacaacgtctgtagcgaccctttgcaggcagcggaaccccccacctggcgacaggtgcccctgcggccaaaagccacgtgtataagatacacctgcaaaggcggcacaaccccagtgccacgttgtgagttggatagttgtggaaagagtcaaatggctctcctcaagcgtattcaacaaggggctgaaggatgcccagaaggtaccccattgtatgggatctgatctggggcctcggtgcacatgctttacatgtgtttagtcgaggttaaaaaaacgtctaggccccccgaaccacggggacgtggttttcctttgaaaaacacgataataccatggtgagcaagggcgaggaggataacatggccatcatcaaggagttcatgcgcttcaaggtgcacatggagggctccgtgaacggccacgagttcgagatcgagggcgagggcgagggccgcccctacgagggcacccagaccgccaagctgaaggtgaccaagggtggccccctgcccttcgcctgggacatcctgtcccctcagttcatgtacggctccaaggcctacgtgaagcaccccgccgacatccccgactacttgaagctgtccttccccgagggcttcaagtgggagcgcgtgatgaacttcgaggacggcggcgtggtgaccgtgacccaggactcctccctgcaggacggcgagttcatctacaaggtgaagctgcgcggcaccaacttcccctccgacggccccgtaatgcagaagaagaccatgggctgggaggcctcctccgagcggatgtaccccgaggacggcgccctgaagggcgagatcaagcagaggctgaagctgaaggacggcggccactacgacgctgaggtcaagaccacctacaaggccaagaagcccgtgcagctgcccggcgcctacaacgtcaacatcaagttggacatcacctcccacaacgaggactacaccatcgtggaacagtacgaacgcgccgagggccgccactccaccggcggcatggacgagctgtacaagtaacaccggtggcgcgttaagtcgacaatcaacctctggattacaaaatttgtgaaagattgactggtattcttaactatgttgctccttttacgctatgtggatacgctgctttaatgcctttgtatcatgctattgcttcccgtatggctttcattttctcctccttgtataaatcctggttgctgtctctttatgaggagttgtggcccgttgtcaggcaacgtggcgtggtgtgcactgtgtttgctgacgcaacccccactggttggggcattgccaccacctgtcagctcctttccgggactttcgctttccccctccctattgccacggcggaactcatcgccgcctgccttgcccgctgctggacaggggctcggctgttgggcactgacaattccgtggtgttgtcggggaaatcatcgtcctttccttggctgctcgcctgtgttgccacctggattctgcgcgggacgtccttctgctacgtcccttcggccctcaatccagcggaccttccttcccgcggcctgctgccggctctgcggcctcttccgcgtcttcgccttcgccctcagacgagtcggatctccctttgggccgcctccccgcgtcgactttaagaccaatgacttacaaggcagctgtagatcttagccactttttaaaagaaaaggggggactggaagggctaattcactcccaacgaagacaagatctgctttttgcttgtactgggtctctctggttagaccagatctgagcctgggagctctctggctaactagggaacccactgcttaagcctcaataaagcttgccttgagtgcttcaagtagtgtgtgcccgtctgttgtgtgactctggtaactagagatccctcagacccttttagtcagtgtggaaaatctctagcagtacgtatagtagttcatgtcatcttattattcagtatttataacttgcaaagaaatgaatatcagagagtgagaggaacttgtttattgcagcttataatggttacaaataaagcaatagcatcacaaatttcacaaataaagcatttttttcactgcattctagttgtggtttgtccaaactcatcaatgtatcttatcatgtctggctctagctatcccgcccctaactccgcccatcccgcccctaactccgcccagttccgcccattctccgccccatggctgactaattttttttatttatgcagaggccgaggccgcctcggcctctgagctattccagaagtagtgaggaggcttttttggaggcctagggacgtacccaattcgccctatagtgagtcgtattacgcgcgctcactggccgtcgttttacaacgtcgtgactgggaaaaccctggcgttacccaacttaatcgccttgcagcacatccccctttcgccagctggcgtaatagcgaagaggcccgcaccgatcgcccttcccaacagttgcgcagcctgaatggcgaatgggacgcgccctgtagcggcgcattaagcgcggcgggtgtggtggttacgcgcagcgtgaccgctacacttgccagcgccctagcgcccgctcctttcgctttcttcccttcctttctcgccacgttcgccggctttccccgtcaagctctaaatcgggggctccctttagggttccgatttagtgctttacggcacctcgaccccaaaaaacttgattagggtgatggttcacgtagtgggccatcgccctgatagacggtttttcgccctttgacgttggagtccacgttctttaatagtggactcttgttccaaactggaacaacactcaaccctatctcggtctattcttttgatttataagggattttgccgatttcggcctattggttaaaaaatgagctgatttaacaaaaatttaacgcgaattttaacaaaatattaacgcttacaatttaggtggcacttttcggggaaatgtgcgcggaacccctatttgtttatttttctaaatacattcaaatatgtatccgctcatgagacaataaccctgataaatgcttcaataatattgaaaaaggaagagtatgagtattcaacatttccgtgtcgcccttattcccttttttgcggcattttgccttcctgtttttgctcacccagaaacgctggtgaaagtaaaagatgctgaagatcagttgggtgcacgagtgggttacatcgaactggatctcaacagcggtaagatccttgagagttttcgccccgaagaacgttttccaatgatgagcacttttaaagttctgctatgtggcgcggtattatcccgtattgacgccgggcaagagcaactcggtcgccgcatacactattctcagaatgacttggttgagtactcaccagtcacagaaaagcatcttacggatggcatgacagtaagagaattatgcagtgctgccataaccatgagtgataacactgcggccaacttacttctgacaacgatcggaggaccgaaggagctaaccgcttttttgcacaacatgggggatcatgtaactcgccttgatcgttgggaaccggagctgaatgaagccataccaaacgacgagcgtgacaccacgatgcctgtagcaatggcaacaacgttgcgcaaactattaactggcgaactacttactctagcttcccggcaacaattaatagactggatggaggcggataaagttgcaggaccacttctgcgctcggcccttccggctggctggtttattgctgataaatctggagccggtgagcgtgggtctcgcggtatcattgcagcactggggccagatggtaagccctcccgtatcgtagttatctacacgacggggagtcaggcaactatggatgaacgaaatagacagatcgctgagataggtgcctcactgattaagcattggtaactgtcagaccaagtttactcatatatactttagattgatttaaaacttcatttttaatttaaaaggatctaggtgaagatcctttttgataatctcatgaccaaaatcccttaacgtgagttttcgttccactgagcgtcagaccccgtagaaaagatcaaaggatcttcttgagatcctttttttctgcgcgtaatctgctgcttgcaaacaaaaaaaccaccgctaccagcggtggtttgtttgccggatcaagagctaccaactctttttccgaaggtaactggcttcagcagagcgcagataccaaatactgttcttctagtgtagccgtagttaggccaccacttcaagaactctgtagcaccgcctacatacctcgctctgctaatcctgttaccagtggctgctgccagtggcgataagtcgtgtcttaccgggttggactcaagacgatagttaccggataaggcgcagcggtcgggctgaacggggggttcgtgcacacagcccagcttggagcgaacgacctacaccgaactgagatacctacagcgtgagctatgagaaagcgccacgcttcccgaagggagaaaggcggacaggtatccggtaagcggcagggtcggaacaggagagcgcacgagggagcttccagggggaaacgcctggtatctttatagtcctgtcgggtttcgccacctctgacttgagcgtcgatttttgtgatgctcgtcaggggggcggagcctatggaaaaacgccagcaacgcggcctttttacggttcctggccttttgctggccttttgctcacatgttctttcctgcgttatcccctgattctgtggataaccgtattaccgcctttgagtgagctgataccgctcgccgcagccgaacgaccgagcgcagcgagtcagtgagcgaggaagcggaagagcgcccaatacgcaaaccgcctctccccgcgcgttggccgattcattaatgcagctggcacgacaggtttcccgactggaaagcgggcagtgagcgcaacgcaattaatgtgagttagctcactcattaggcaccccaggctttacactttatgcttccggctcgtatgttgtgtggaattgtgagcggataacaatttcacacaggaaacagctatgaccatgattacgccaagcgcgcaattaaccctcactaaagggaacaaaagctggagctgcaagcttaatgtagtcttatgcaatactcttgtagtcttgcaacatggtaacgatgagttagcaacatgccttacaaggagagaaaaagcaccgtgcatgccgattggtggaagtaaggtggtacgatcgtgccttattaggaaggcaacagacgggtctgacatggattggacgaaccactgaattgccgcattgcagagatattgtatttaagtgcctagctcgatacataaacgggtctctctggttagaccagatctgagcctgggagctctctggctaactagggaacccactgcttaagcctcaataaagcttgccttgagtgcttcaagtagtgtgtgcccgtctgttgtgtgactctggtaactagagatccctcagacccttttagtcagtgtggaaaatctctagcagtggcgcccgaacagggacttgaaagcgaaagggaaaccagaggagctctctcgacgcaggactcggcttgctgaagcgcgcacggcaagaggcgaggggcggcgactggtgagtacgccaaaaattttgactagcggaggctagaaggagagagatgggtgcgagagcgtcagtattaagcgggggagaattagatcgcgatgggaaaaaattcggttaaggccagggggaaagaaaaaatataaattaaaacatatagtatgggcaagcagggagctagaacgattcgcagttaatcctggcctgttagaaacatcagaaggctgtagacaaatactgggacagctacaaccatcccttcagacaggatcagaagaacttagatcattatataatacagtagcaaccctctattgtgtgcatcaaaggatagagataaaagacaccaaggaagctttagacaagatagaggaagagcaaaacaaaagtaagaccaccgcacagcaagcggccgctgatcttcagacctggaggaggagatatgagggacaattggagaagtgaattatataaatataaagtagtaaaaattgaaccattaggagtagcacccaccaaggcaaagagaagagtggtgcagagagaaaaaagagcagtgggaataggagctttgttccttgggttcttgggagcagcaggaagcactatgggcgcagcgtcaatgacgctgacggtacaggccagacaattattgtctggtatagtgcagcagcagaacaatttgctgagggctattgaggcgcaacagcatctgttgcaactcacagtctggggcatcaagcagctccaggcaagaatcctggctgtggaaagatacctaaaggatcaacagctcctggggatttggggttgctctggaaaactcatttgcaccactgctgtgccttggaatgctagttggagtaataaatctctggaacagatttggaatcacacgacctggatggagtgggacagagaaattaacaattacacaagcttaatacactccttaattgaagaatcgcaaaaccagcaagaaaagaatgaacaagaattattggaattagataaatgggcaagtttgtggaattggtttaacataacaaattggctgtggtatataaaattattcataatgatagtaggaggcttggtaggtttaagaatagtttttgctgtactttctatagtgaatagagttaggcagggatattcaccattatcgtttcagacccacctcccaaccccgaggggacccttgcgccttttccaaggcagccctgggtttgcgcagggacgcggctgctctgggcgtggttccgggaaacgcagcggcgccgaccctgggtctcgcacattcttcacgtccgttcgcagcgtcacccggatcttcgccgctacccttgtgggccccccggcgacgcttcctgctccgcccctaagtcgggaaggttccttgcggttcgcggcgtgccggacgtgacaaacggaagccgcacgtctcactagtaccctcgcagacggacagcgccagggagcaatggcagcgcgccgaccgcgatgggctgtggccaatagcggctgctcagcagggcgcgccgagagcagcggccgggaaggggcggtgcgggaggcggggtgtggggcggtagtgtgggccctgttcctgcccgcgcggtgttccgcattctgcaagcctccggagcgcacgtcggcagtcggctccctcgttgaccgaatcaccgacctctctccccagggggtacccagctgtctagagaattctagatcttgagacaaatggcagtattcatccacaattttaaaagaaaaggggggattggggggtacagtgcaggggaaagaatagtagacataatagcaacagacatacaaactaaagaattacaaaaacaaattacaaaaattcaaaattttcgggtttattacagggacagcagagatccactttggcgccggctcgaggggg

SEQ ID NO: 157 - protein, 152 aa, Artificial Sequence
  Synthetic Polypeptide
MIKIATRKYLGKQNVYDIGVERDHNFALKNGFIASNCGAVFAEIGPRMAELSGSRLAAQQQMEGLLAPHRPKEPAWFLATVGVSPDHQGKGLGSAVVLPGVEAAERAGVPAFLETSAPRNLPFYERLGFTVTADVEVPEGPRTWCMTRKPGA

SEQ ID NO: 158 - DNA, 9363 bp, Artificial Sequence
  Synthetic Polynucleotide
cccggggttattaatagtaatcaattacggggtcattagttcatagcccatatatggagttccgcgttacataacttacggtaaatggcccgcctggctgaccgcccaacgacccccgcccattgacgtcaataatgacgtatgttcccatagtaacgccaatagggactttccattgacgtcaatgggtggagtatttacggtaaactgcccacttggcagtacatcaagtgtatcatatgccaagtacgccccctattgacgtcaatgacggtaaatggcccgcctggcattatgcccagtacatgaccttatgggactttcctacttggcagtacatctacgtattagtcatcgctattaccatggtgatgcggttttggcagtacatcaatgggcgtggatagcggtttgactcacggggatttccaagtctccaccccattgacgtcaatgggagtttgttttggcaccaaaatcaacgggactttccaaaatgtcgtaacaactccgccccattgacgcaaatgggcggtaggcgtgtacggtgggaggtctatataagcagagctctctggctaactgtcgggatcaacaagtttgtacaaaaaagcaggctccgaattcaccggtgccaccatgaccgagtacaagcccacggtgcgcctcgccacccgcgacgacgtccccagggccgtacgcaccctcgccgccgcgttcgccgactaccccgccacgcgccacaccgtcgatccggaccgccacatcgagcgggtcaccgagctgcaagaactcttcctcacgcgcgtcgggctcgacatcggcaaggtgtgggtcgcggacgacggcgccgcggtggcggtctggaccacgccggagagcgtcgaagcgggggcggtgttcgccgagatcggcccgcgcatggccgagttgagcggttcccggctggccgcgcagcaacagatggaaggcctcctggcgccgcaccggcccaaggagcccgcgtggttcctggccaccgtcggcgtctcgcccgaccaccagggcaagtgcctttcatacgagaccgagatcctgactgtcgagtacggattgcttcctatcggcaaaatcgtggagaagaggattgaatgtaccgtctattcagtcgataataatgggaacatctacacacagcccgtggctcaatggcacgacagaggagagcaggaagtttttgaatactgtctcgaggacggatccctcatccgcgctactaaagatcataagtttatgaccgtggacggccagatgctgccaattgacgaaatttttgaacgagagctggatctgatgagagtcgacaaccttccaaactgattaattaagaattcgacccagctttcttgtacaaagtggttggtaagcctatccctaaccctctcctcggtctcgattctacgtagtaatgagctagcagtctcgaggttaacgaattccgccccccccctaacgttactggccgaagccgcttggaataaggccggtgtgcgcttgtctatatgttattttccaccatattgccgtcttttggcaatgtgagggcccggaaacctggccctgtcttcttgacgagcattcctaggggtctttcccctctcgccaaaggaatgcaaggtctgttgaatgtcgtgaaggaagcagttcctctggaagcttcttgaagacaaacaacgtctgtagcgaccctttgcaggcagcggaaccccccacctggcgacaggtgcccctgcggccaaaagccacgtgtataagatacacctgcaaaggcggcacaaccccagtgccacgttgtgagttggatagttgtggaaagagtcaaatggctctcctcaagcgtattcaacaaggggctgaaggatgcccagaaggtaccccattgtatgggatctgatctggggcctcggtgcacatgctttacatgtgtttagtcgaggttaaaaaaacgtctaggccccccgaaccacggggacgtggttttcctttgaaaaacacgataataccatggccatgagcgagctgattaaggagaacatgcacatgaagctgtacatggagggcaccgtggacaaccatcacttcaagtgcacatccgagggcgaaggcaagccctacgagggcacccagaccatgagaatcaaggtggtcgagggcggccctctccccttcgccttcgacatcctggctactagcttcctctacggcagcaagaccttcatcaaccacacccagggcatccccgacttcttcaagcagtccttccctgagggcttcacatgggagagagtcaccacatacgaagacgggggcgtgctgaccgctacccaggacaccagcctccaggacggctgcctcatctacaacgtcaagatcagaggggtgaacttcacatccaacggccctgtgatgcagaagaaaacactcggctgggaggccttcaccgagacgctgtaccccgctgacggcggcctggaaggcagaaacgacatggccctgaagctcgtgggcgggagccatctgatcgcaaacatcaagaccacatatagatccaagaaacccgctaagaacctcaagatgcctggcgtctactatgtggactacagactggaaagaatcaaggaggccaacaacgagacctacgtcgagcagcacgaggtggcagtggccagatactgcgacctccctagcaaactggggcacaagcttaattaacaccggtggcgcgttaagtcgacaatcaacctctggattacaaaatttgtgaaagattgactggtattcttaactatgttgctccttttacgctatgtggatacgctgctttaatgcctttgtatcatgctattgcttcccgtatggctttcattttctcctccttgtataaatcctggttgctgtctctttatgaggagttgtggcccgttgtcaggcaacgtggcgtggtgtgcactgtgtttgctgacgcaacccccactggttggggcattgccaccacctgtcagctcctttccgggactttcgctttccccctccctattgccacggcggaactcatcgccgcctgccttgcccgctgctggacaggggctcggctgttgggcactgacaattccgtggtgttgtcggggaaatcatcgtcctttccttggctgctcgcctgtgttgccacctggattctgcgcgggacgtccttctgctacgtcccttcggccctcaatccagcggaccttccttcccgcggcctgctgccggctctgcggcctcttccgcgtcttcgccttcgccctcagacgagtcggatctccctttgggccgcctccccgcgtcgactttaagaccaatgacttacaaggcagctgtagatcttagccactttttaaaagaaaaggggggactggaagggctaattcactcccaacgaagacaagatctgctttttgcttgtactgggtctctctggttagaccagatctgagcctgggagctctctggctaactagggaacccactgcttaagcctcaataaagcttgccttgagtgcttcaagtagtgtgtgcccgtctgttgtgtgactctggtaactagagatccctcagacccttttagtcagtgtggaaaatctctagcagtacgtatagtagttcatgtcatcttattattcagtatttataacttgcaaagaaatgaatatcagagagtgagaggaacttgtttattgcagcttataatggttacaaataaagcaatagcatcacaaatttcacaaataaagcatttttttcactgcattctagttgtggtttgtccaaactcatcaatgtatcttatcatgtctggctctagctatcccgcccctaactccgcccatcccgcccctaactccgcccagttccgcccattctccgccccatggctgactaattttttttatttatgcagaggccgaggccgcctcggcctctgagctattccagaagtagtgaggaggcttttttggaggcctagggacgtacccaattcgccctatagtgagtcgtattacgcgcgctcactggccgtcgttttacaacgtcgtgactgggaaaaccctggcgttacccaacttaatcgccttgcagcacatccccctttcgccagctggcgtaatagcgaagaggcccgcaccgatcgcccttcccaacagttgcgcagcctgaatggcgaatgggacgcgccctgtagcggcgcattaagcgcggcgggtgtggtggttacgcgcagcgtgaccgctacacttgccagcgccctagcgcccgctcctttcgctttcttcccttcctttctcgccacgttcgccggctttccccgtcaagctctaaatcgggggctccctttagggttccgatttagtgctttacggcacctcgaccccaaaaaacttgattagggtgatggttcacgtagtgggccatcgccctgatagacggtttttcgccctttgacgttggagtccacgttctttaatagtggactcttgttccaaactggaacaacactcaaccctatctcggtctattcttttgatttataagggattttgccgatttcggcctattggttaaaaaatgagctgatttaacaaaaatttaacgcgaattttaacaaaatattaacgcttacaatttaggtggcacttttcggggaaatgtgcgcggaacccctatttgtttatttttctaaatacattcaaatatgtatccgctcatgagacaataaccctgataaatgcttcaataatattgaaaaaggaagagtatgagtattcaacatttccgtgtcgcccttattcccttttttgcggcattttgccttcctgtttttgctcacccagaaacgctggtgaaagtaaaagatgctgaagatcagttgggtgcacgagtgggttacatcgaactggatctcaacagcggtaagatccttgagagttttcgccccgaagaacgttttccaatgatgagcacttttaaagttctgctatgtggcgcggtattatcccgtattgacgccgggcaagagcaactcggtcgccgcatacactattctcagaatgacttggttgagtactcaccagtcacagaaaagcatcttacggatggcatgacagtaagagaattatgcagtgctgccataaccatgagtgataacactgcggccaacttacttctgacaacgatcggaggaccgaaggagctaaccgcttttttgcacaacatgggggatcatgtaactcgccttgatcgttgggaaccggagctgaatgaagccataccaaacgacgagcgtgacaccacgatgcctgtagcaatggcaacaacgttgcgcaaactattaactggcgaactacttactctagcttcccggcaacaattaatagactggatggaggcggataaagttgcaggaccacttctgcgctcggcccttccggctggctggtttattgctgataaatctggagccggtgagcgtgggtctcgcggtatcattgcagcactggggccagatggtaagccctcccgtatcgtagttatctacacgacggggagtcaggcaactatggatgaacgaaatagacagatcgctgagataggtgcctcactgattaagcattggtaactgtcagaccaagtttactcatatatactttagattgatttaaaacttcatttttaatttaaaaggatctaggtgaagatcctttttgataatctcatgaccaaaatcccttaacgtgagttttcgttccactgagcgtcagaccccgtagaaaagatcaaaggatcttcttgagatcctttttttctgcgcgtaatctgctgcttgcaaacaaaaaaaccaccgctaccagcggtggtttgtttgccggatcaagagctaccaactctttttccgaaggtaactggcttcagcagagcgcagataccaaatactgttcttctagtgtagccgtagttaggccaccacttcaagaactctgtagcaccgcctacatacctcgctctgctaatcctgttaccagtggctgctgccagtggcgataagtcgtgtcttaccgggttggactcaagacgatagttaccggataaggcgcagcggtcgggctgaacggggggttcgtgcacacagcccagcttggagcgaacgacctacaccgaactgagatacctacagcgtgagctatgagaaagcgccacgcttcccgaagggagaaaggcggacaggtatccggtaagcggcagggtcggaacaggagagcgcacgagggagcttccagggggaaacgcctggtatctttatagtcctgtcgggtttcgccacctctgacttgagcgtcgatttttgtgatgctcgtcaggggggcggagcctatggaaaaacgccagcaacgcggcctttttacggttcctggccttttgctggccttttgctcacatgttctttcctgcgttatcccctgattctgtggataaccgtattaccgcctttgagtgagctgataccgctcgccgcagccgaacgaccgagcgcagcgagtcagtgagcgaggaagcggaagagcgcccaatacgcaaaccgcctctccccgcgcgttggccgattcattaatgcagctggcacgacaggtttcccgactggaaagcgggcagtgagcgcaacgcaattaatgtgagttagctcactcattaggcaccccaggctttacactttatgcttccggctcgtatgttgtgtggaattgtgagcggataacaatttcacacaggaaacagctatgaccatgattacgccaagcgcgcaattaaccctcactaaagggaacaaaagctggagctgcaagcttaatgtagtcttatgcaatactcttgtagtcttgcaacatggtaacgatgagttagcaacatgccttacaaggagagaaaaagcaccgtgcatgccgattggtggaagtaaggtggtacgatcgtgccttattaggaaggcaacagacgggtctgacatggattggacgaaccactgaattgccgcattgcagagatattgtatttaagtgcctagctcgatacataaacgggtctctctggttagaccagatctgagcctgggagctctctggctaactagggaacccactgcttaagcctcaataaagcttgccttgagtgcttcaagtagtgtgtgcccgtctgttgtgtgactctggtaactagagatccctcagacccttttagtcagtgtggaaaatctctagcagtggcgcccgaacagggacttgaaagcgaaagggaaaccagaggagctctctcgacgcaggactcggcttgctgaagcgcgcacggcaagaggcgaggggcggcgactggtgagtacgccaaaaattttgactagcggaggctagaaggagagagatgggtgcgagagcgtcagtattaagcgggggagaattagatcgcgatgggaaaaaattcggttaaggccagggggaaagaaaaaatataaattaaaacatatagtatgggcaagcagggagctagaacgattcgcagttaatcctggcctgttagaaacatcagaaggctgtagacaaatactgggacagctacaaccatcccttcagacaggatcagaagaacttagatcattatataatacagtagcaaccctctattgtgtgcatcaaaggatagagataaaagacaccaaggaagctttagacaagatagaggaagagcaaaacaaaagtaagaccaccgcacagcaagcggccgctgatcttcagacctggaggaggagatatgagggacaattggagaagtgaattatataaatataaagtagtaaaaattgaaccattaggagtagcacccaccaaggcaaagagaagagtggtgcagagagaaaaaagagcagtgggaataggagctttgttccttgggttcttgggagcagcaggaagcactatgggcgcagcgtcaatgacgctgacggtacaggccagacaattattgtctggtatagtgcagcagcagaacaatttgctgagggctattgaggcgcaacagcatctgttgcaactcacagtctggggcatcaagcagctccaggcaagaatcctggctgtggaaagatacctaaaggatcaacagctcctggggatttggggttgctctggaaaactcatttgcaccactgctgtgccttggaatgctagttggagtaataaatctctggaacagatttggaatcacacgacctggatggagtgggacagagaaattaacaattacacaagcttaatacactccttaattgaagaatcgcaaaaccagcaagaaaagaatgaacaagaattattggaattagataaatgggcaagtttgtggaattggtttaacataacaaattggctgtggtatataaaattattcataatgatagtaggaggcttggtaggtttaagaatagtttttgctgtactttctatagtgaatagagttaggcagggatattcaccattatcgtttcagacccacctcccaaccccgaggggacccttgcgccttttccaaggcagccctgggtttgcgcagggacgcggctgctctgggcgtggttccgggaaacgcagcggcgccgaccctgggtctcgcacattcttcacgtccgttcgcagcgtcacccggatcttcgccgctacccttgtgggccccccggcgacgcttcctgctccgcccctaagtcgggaaggttccttgcggttcgcggcgtgccggacgtgacaaacggaagccgcacgtctcactagtaccctcgcagacggacagcgccagggagcaatggcagcgcgccgaccgcgatgggctgtggccaatagcggctgctcagcagggcgcgccgagagcagcggccgggaaggggcggtgcgggaggcggggtgtggggcggtagtgtgggccctgttcctgcccgcgcggtgttccgcattctgcaagcctccggagcgcacgtcggcagtcggctccctcgttgaccgaatcaccgacctctctccccagggggtacccagctgtctagagaattctagatcttgagacaaatggcagtattcatccacaattttaaaagaaaaggggggattggggggtacagtgcaggggaaagaatagtagacataatagcaacagacatacaaactaaagaattacaaaaacaaattacaaaaattcaaaattttcgggtttattacagggacagcagagatccactttggcgccggctcgaggggg

SEQ ID NO: 159 - protein, 239 aa, Artificial Sequence
  Synthetic Polypeptide
MTEYKPTVRLATRDDVPRAVRTLAAAFADYPATRHTVDPDRHIERVTELQELFLTRVGLDIGKVWVADDGAAVAVWTTPESVEAGAVFAEIGPRMAELSGSRLAAQQQMEGLLAPHRPKEPAWFLATVGVSPDHQGKCLSYETEILTVEYGLLPIGKIVEKRIECTVYSVDNNGNIYTQPVAQWHDRGEQEVFEYCLEDGSLIRATKDHKFMTVDGQMLPIDEIFERELDLMRVDNLPN

SEQ ID NO: 160 - DNA, 8949 bp, Artificial Sequence
  Synthetic Polynucleotide
cccggggttattaatagtaatcaattacggggtcattagttcatagcccatatatggagttccgcgttacataacttacggtaaatggcccgcctggctgaccgcccaacgacccccgcccattgacgtcaataatgacgtatgttcccatagtaacgccaatagggactttccattgacgtcaatgggtggagtatttacggtaaactgcccacttggcagtacatcaagtgtatcatatgccaagtacgccccctattgacgtcaatgacggtaaatggcccgcctggcattatgcccagtacatgaccttatgggactttcctacttggcagtacatctacgtattagtcatcgctattaccatggtgatgcggttttggcagtacatcaatgggcgtggatagcggtttgactcacggggatttccaagtctccaccccattgacgtcaatgggagtttgttttggcaccaaaatcaacgggactttccaaaatgtcgtaacaactccgccccattgacgcaaatgggcggtaggcgtgtacggtgggaggtctatataagcagagctctctggctaactgtcgggatcaacaagtttgtacaaaaaagcaggctccgaattcaccggtgccgccaccatgattaagatcgctacgcggaagtacctggggaaacagaacgtctacgacataggtgtggagcgcgatcacaactttgctctgaaaaatggatttatcgccagcaactgcggtctgggcagcgccgtcgtgctccccggagtggaggcggccgagcgcgccggggtgcccgccttcctggagacctccgcgccccgcaacctccccttctacgagcggctcggcttcaccgtcaccgccgacgtcgaggtgcccgaaggaccgcgcacctggtgcatgacccgcaagcccggtgcctgattaattaagaattcgacccagctttcttgtacaaagtggttggtaagcctatccctaaccctctcctcggtctcgattctacgtagtaatgagctagcagtctcgaggttaacgaattccgccccccccctaacgttactggccgaagccgcttggaataaggccggtgtgcgcttgtctatatgttattttccaccatattgccgtcttttggcaatgtgagggcccggaaacctggccctgtcttcttgacgagcattcctaggggtctttcccctctcgccaaaggaatgcaaggtctgttgaatgtcgtgaaggaagcagttcctctggaagcttcttgaagacaaacaacgtctgtagcgaccctttgcaggcagcggaaccccccacctggcgacaggtgcccctgcggccaaaagccacgtgtataagatacacctgcaaaggcggcacaaccccagtgccacgttgtgagttggatagttgtggaaagagtcaaatggctctcctcaagcgtattcaacaaggggctgaaggatgcccagaaggtaccccattgtatgggatctgatctggggcctcggtgcacatgctttacatgtgtttagtcgaggttaaaaaaacgtctaggccccccgaaccacggggacgtggttttcctttgaaaaacacgataataccatggtgagcaagggcgaggaggataacatggccatcatcaaggagttcatgcgcttcaaggtgcacatggagggctccgtgaacggccacgagttcgagatcgagggcgagggcgagggccgcccctacgagggcacccagaccgccaagctgaaggtgaccaagggtggccccctgcccttcgcctgggacatcctgtcccctcagttcatgtacggctccaaggcctacgtgaagcaccccgccgacatccccgactacttgaagctgtccttccccgagggcttcaagtgggagcgcgtgatgaacttcgaggacggcggcgtggtgaccgtgacccaggactcctccctgcaggacggcgagttcatctacaaggtgaagctgcgcggcaccaacttcccctccgacggccccgtaatgcagaagaagaccatgggctgggaggcctcctccgagcggatgtaccccgaggacggcgccctgaagggcgagatcaagcagaggctgaagctgaaggacggcggccactacgacgctgaggtcaagaccacctacaaggccaagaagcccgtgcagctgcccggcgcctacaacgtcaacatcaagttggacatcacctcccacaacgaggactacaccatcgtggaacagtacgaacgcgccgagggccgccactccaccggcggcatggacgagctgtacaagtaacaccggtggcgcgttaagtcgacaatcaacctctggattacaaaatttgtgaaagattgactggtattcttaactatgttgctccttttacgctatgtggatacgctgctttaatgcctttgtatcatgctattgcttcccgtatggctttcattttctcctccttgtataaatcctggttgctgtctctttatgaggagttgtggcccgttgtcaggcaacgtggcgtggtgtgcactgtgtttgctgacgcaacccccactggttggggcattgccaccacctgtcagctcctttccgggactttcgctttccccctccctattgccacggcggaactcatcgccgcctgccttgcccgctgctggacaggggctcggctgttgggcactgacaattccgtggtgttgtcggggaaatcatcgtcctttccttggctgctcgcctgtgttgccacctggattctgcgcgggacgtccttctgctacgtcccttcggccctcaatccagcggaccttccttcccgcggcctgctgccggctctgcggcctcttccgcgtcttcgccttcgccctcagacgagtcggatctccctttgggccgcctccccgcgtcgactttaagaccaatgacttacaaggcagctgtagatcttagccactttttaaaagaaaaggggggactggaagggctaattcactcccaacgaagacaagatctgctttttgcttgtactgggtctctctggttagaccagatctgagcctgggagctctctggctaactagggaacccactgcttaagcctcaataaagcttgccttgagtgcttcaagtagtgtgtgcccgtctgttgtgtgactctggtaactagagatccctcagacccttttagtcagtgtggaaaatctctagcagtacgtatagtagttcatgtcatcttattattcagtatttataacttgcaaagaaatgaatatcagagagtgagaggaacttgtttattgcagcttataatggttacaaataaagcaatagcatcacaaatttcacaaataaagcatttttttcactgcattctagttgtggtttgtccaaactcatcaatgtatcttatcatgtctggctctagctatcccgcccctaactccgcccatcccgcccctaactccgcccagttccgcccattctccgccccatggctgactaattttttttatttatgcagaggccgaggccgcctcggcctctgagctattccagaagtagtgaggaggcttttttggaggcctagggacgtacccaattcgccctatagtgagtcgtattacgcgcgctcactggccgtcgttttacaacgtcgtgactgggaaaaccctggcgttacccaacttaatcgccttgcagcacatccccctttcgccagctggcgtaatagcgaagaggcccgcaccgatcgcccttcccaacagttgcgcagcctgaatggcgaatgggacgcgccctgtagcggcgcattaagcgcggcgggtgtggtggttacgcgcagcgtgaccgctacacttgccagcgccctagcgcccgctcctttcgctttcttcccttcctttctcgccacgttcgccggctttccccgtcaagctctaaatcgggggctccctttagggttccgatttagtgctttacggcacctcgaccccaaaaaacttgattagggtgatggttcacgtagtgggccatcgccctgatagacggtttttcgccctttgacgttggagtccacgttctttaatagtggactcttgttccaaactggaacaacactcaaccctatctcggtctattcttttgatttataagggattttgccgatttcggcctattggttaaaaaatgagctgatttaacaaaaatttaacgcgaattttaacaaaatattaacgcttacaatttaggtggcacttttcggggaaatgtgcgcggaacccctatttgtttatttttctaaatacattcaaatatgtatccgctcatgagacaataaccctgataaatgcttcaataatattgaaaaaggaagagtatgagtattcaacatttccgtgtcgcccttattcccttttttgcggcattttgccttcctgtttttgctcacccagaaacgctggtgaaagtaaaagatgctgaagatcagttgggtgcacgagtgggttacatcgaactggatctcaacagcggtaagatccttgagagttttcgccccgaagaacgttttccaatgatgagcacttttaaagttctgctatgtggcgcggtattatcccgtattgacgccgggcaagagcaactcggtcgccgcatacactattctcagaatgacttggttgagtactcaccagtcacagaaaagcatcttacggatggcatgacagtaagagaattatgcagtgctgccataaccatgagtgataacactgcggccaacttacttctgacaacgatcggaggaccgaaggagctaaccgcttttttgcacaacatgggggatcatgtaactcgccttgatcgttgggaaccggagctgaatgaagccataccaaacgacgagcgtgacaccacgatgcctgtagcaatggcaacaacgttgcgcaaactattaactggcgaactacttactctagcttcccggcaacaattaatagactggatggaggcggataaagttgcaggaccacttctgcgctcggcccttccggctggctggtttattgctgataaatctggagccggtgagcgtgggtctcgcggtatcattgcagcactggggccagatggtaagccctcccgtatcgtagttatctacacgacggggagtcaggcaactatggatgaacgaaatagacagatcgctgagataggtgcctcactgattaagcattggtaactgtcagaccaagtttactcatatatactttagattgatttaaaacttcatttttaatttaaaaggatctaggtgaagatcctttttgataatctcatgaccaaaatcccttaacgtgagttttcgttccactgagcgtcagaccccgtagaaaagatcaaaggatcttcttgagatcctttttttctgcgcgtaatctgctgcttgcaaacaaaaaaaccaccgctaccagcggtggtttgtttgccggatcaagagctaccaactctttttccgaaggtaactggcttcagcagagcgcagataccaaatactgttcttctagtgtagccgtagttaggccaccacttcaagaactctgtagcaccgcctacatacctcgctctgctaatcctgttaccagtggctgctgccagtggcgataagtcgtgtcttaccgggttggactcaagacgatagttaccggataaggcgcagcggtcgggctgaacggggggttcgtgcacacagcccagcttggagcgaacgacctacaccgaactgagatacctacagcgtgagctatgagaaagcgccacgcttcccgaagggagaaaggcggacaggtatccggtaagcggcagggtcggaacaggagagcgcacgagggagcttccagggggaaacgcctggtatctttatagtcctgtcgggtttcgccacctctgacttgagcgtcgatttttgtgatgctcgtcaggggggcggagcctatggaaaaacgccagcaacgcggcctttttacggttcctggccttttgctggccttttgctcacatgttctttcctgcgttatcccctgattctgtggataaccgtattaccgcctttgagtgagctgataccgctcgccgcagccgaacgaccgagcgcagcgagtcagtgagcgaggaagcggaagagcgcccaatacgcaaaccgcctctccccgcgcgttggccgattcattaatgcagctggcacgacaggtttcccgactggaaagcgggcagtgagcgcaacgcaattaatgtgagttagctcactcattaggcaccccaggctttacactttatgcttccggctcgtatgttgtgtggaattgtgagcggataacaatttcacacaggaaacagctatgaccatgattacgccaagcgcgcaattaaccctcactaaagggaacaaaagctggagctgcaagcttaatgtagtcttatgcaatactcttgtagtcttgcaacatggtaacgatgagttagcaacatgccttacaaggagagaaaaagcaccgtgcatgccgattggtggaagtaaggtggtacgatcgtgccttattaggaaggcaacagacgggtctgacatggattggacgaaccactgaattgccgcattgcagagatattgtatttaagtgcctagctcgatacataaacgggtctctctggttagaccagatctgagcctgggagctctctggctaactagggaacccactgcttaagcctcaataaagcttgccttgagtgcttcaagtagtgtgtgcccgtctgttgtgtgactctggtaactagagatccctcagacccttttagtcagtgtggaaaatctctagcagtggcgcccgaacagggacttgaaagcgaaagggaaaccagaggagctctctcgacgcaggactcggcttgctgaagcgcgcacggcaagaggcgaggggcggcgactggtgagtacgccaaaaattttgactagcggaggctagaaggagagagatgggtgcgagagcgtcagtattaagcgggggagaattagatcgcgatgggaaaaaattcggttaaggccagggggaaagaaaaaatataaattaaaacatatagtatgggcaagcagggagctagaacgattcgcagttaatcctggcctgttagaaacatcagaaggctgtagacaaatactgggacagctacaaccatcccttcagacaggatcagaagaacttagatcattatataatacagtagcaaccctctattgtgtgcatcaaaggatagagataaaagacaccaaggaagctttagacaagatagaggaagagcaaaacaaaagtaagaccaccgcacagcaagcggccgctgatcttcagacctggaggaggagatatgagggacaattggagaagtgaattatataaatataaagtagtaaaaattgaaccattaggagtagcacccaccaaggcaaagagaagagtggtgcagagagaaaaaagagcagtgggaataggagctttgttccttgggttcttgggagcagcaggaagcactatgggcgcagcgtcaatgacgctgacggtacaggccagacaattattgtctggtatagtgcagcagcagaacaatttgctgagggctattgaggcgcaacagcatctgttgcaactcacagtctggggcatcaagcagctccaggcaagaatcctggctgtggaaagatacctaaaggatcaacagctcctggggatttggggttgctctggaaaactcatttgcaccactgctgtgccttggaatgctagttggagtaataaatctctggaacagatttggaatcacacgacctggatggagtgggacagagaaattaacaattacacaagcttaatacactccttaattgaagaatcgcaaaaccagcaagaaaagaatgaacaagaattattggaattagataaatgggcaagtttgtggaattggtttaacataacaaattggctgtggtatataaaattattcataatgatagtaggaggcttggtaggtttaagaatagtttttgctgtactttctatagtgaatagagttaggcagggatattcaccattatcgtttcagacccacctcccaaccccgaggggacccttgcgccttttccaaggcagccctgggtttgcgcagggacgcggctgctctgggcgtggttccgggaaacgcagcggcgccgaccctgggtctcgcacattcttcacgtccgttcgcagcgtcacccggatcttcgccgctacccttgtgggccccccggcgacgcttcctgctccgcccctaagtcgggaaggttccttgcggttcgcggcgtgccggacgtgacaaacggaagccgcacgtctcactagtaccctcgcagacggacagcgccagggagcaatggcagcgcgccgaccgcgatgggctgtggccaatagcggctgctcagcagggcgcgccgagagcagcggccgggaaggggcggtgcgggaggcggggtgtggggcggtagtgtgggccctgttcctgcccgcgcggtgttccgcattctgcaagcctccggagcgcacgtcggcagtcggctccctcgttgaccgaatcaccgacctctctccccagggggtacccagctgtctagagaattctagatcttgagacaaatggcagtattcatccacaattttaaaagaaaaggggggattggggggtacagtgcaggggaaagaatagtagacataatagcaacagacatacaaactaaagaattacaaaaacaaattacaaaaattcaaaattttcgggtttattacagggacagcagagatccactttggcgccggctcgaggggg

SEQ ID NO: 161 - protein, 99 aa, Artificial Sequence
  Synthetic Polypeptide
MIKIATRKYLGKQNVYDIGVERDHNFALKNGFIASNCGLGSAVVLPGVEAAERAGVPAFLETSAPRNLPFYERLGFTVTADVEVPEGPRTWCMTRKPGA

SEQ ID NO: 162 - DNA, 9426 bp, Artificial Sequence
  Synthetic Polynucleotide
cccggggttattaatagtaatcaattacggggtcattagttcatagcccatatatggagttccgcgttacataacttacggtaaatggcccgcctggctgaccgcccaacgacccccgcccattgacgtcaataatgacgtatgttcccatagtaacgccaatagggactttccattgacgtcaatgggtggagtatttacggtaaactgcccacttggcagtacatcaagtgtatcatatgccaagtacgccccctattgacgtcaatgacggtaaatggcccgcctggcattatgcccagtacatgaccttatgggactttcctacttggcagtacatctacgtattagtcatcgctattaccatggtgatgcggttttggcagtacatcaatgggcgtggatagcggtttgactcacggggatttccaagtctccaccccattgacgtcaatgggagtttgttttggcaccaaaatcaacgggactttccaaaatgtcgtaacaactccgccccattgacgcaaatgggcggtaggcgtgtacggtgggaggtctatataagcagagctctctggctaactgtcgggatcaacaagtttgtacaaaaaagcaggctccgaattcaccggtgccaccatgaccgagtacaagcccacggtgcgcctcgccacccgcgacgacgtccccagggccgtacgcaccctcgccgccgcgttcgccgactaccccgccacgcgccacaccgtcgatccggaccgccacatcgagcgggtcaccgagctgcaagaactcttcctcacgcgcgtcgggctcgacatcggcaaggtgtgggtcgcggacgacggcgccgcggtggcggtctggaccacgccggagagcgtcgaagcgggggcggtgttcgccgagatcggcccgcgcatggccgagttgagcggttcccggctggccgcgcagcaacagatggaaggcctcctggcgccgcaccggcccaaggagcccgcgtggttcctggccaccgtcggcgtctcgcccgaccaccagggcaagggtctgggcagcgccgtcgtgctccccggagtggaggcggccgagcgcgccggggtgcccgcctgcctttcatacgagaccgagatcctgactgtcgagtacggattgcttcctatcggcaaaatcgtggagaagaggattgaatgtaccgtctattcagtcgataataatgggaacatctacacacagcccgtggctcaatggcacgacagaggagagcaggaagtttttgaatactgtctcgaggacggatccctcatccgcgctactaaagatcataagtttatgaccgtggacggccagatgctgccaattgacgaaatttttgaacgagagctggatctgatgagagtcgacaaccttccaaactgattaattaagaattcgacccagctttcttgtacaaagtggttggtaagcctatccctaaccctctcctcggtctcgattctacgtagtaatgagctagcagtctcgaggttaacgaattccgccccccccctaacgttactggccgaagccgcttggaataaggccggtgtgcgcttgtctatatgttattttccaccatattgccgtcttttggcaatgtgagggcccggaaacctggccctgtcttcttgacgagcattcctaggggtctttcccctctcgccaaaggaatgcaaggtctgttgaatgtcgtgaaggaagcagttcctctggaagcttcttgaagacaaacaacgtctgtagcgaccctttgcaggcagcggaaccccccacctggcgacaggtgcccctgcggccaaaagccacgtgtataagatacacctgcaaaggcggcacaaccccagtgccacgttgtgagttggatagttgtggaaagagtcaaatggctctcctcaagcgtattcaacaaggggctgaaggatgcccagaaggtaccccattgtatgggatctgatctggggcctcggtgcacatgctttacatgtgtttagtcgaggttaaaaaaacgtctaggccccccgaaccacggggacgtggttttcctttgaaaaacacgataataccatggccatgagcgagctgattaaggagaacatgcacatgaagctgtacatggagggcaccgtggacaaccatcacttcaagtgcacatccgagggcgaaggcaagccctacgagggcacccagaccatgagaatcaaggtggtcgagggcggccctctccccttcgccttcgacatcctggctactagcttcctctacggcagcaagaccttcatcaaccacacccagggcatccccgacttcttcaagcagtccttccctgagggcttcacatgggagagagtcaccacatacgaagacgggggcgtgctgaccgctacccaggacaccagcctccaggacggctgcctcatctacaacgtcaagatcagaggggtgaacttcacatccaacggccctgtgatgcagaagaaaacactcggctgggaggccttcaccgagacgctgtaccccgctgacggcggcctggaaggcagaaacgacatggccctgaagctcgtgggcgggagccatctgatcgcaaacatcaagaccacatatagatccaagaaacccgctaagaacctcaagatgcctggcgtctactatgtggactacagactggaaagaatcaaggaggccaacaacgagacctacgtcgagcagcacgaggtggcagtggccagatactgcgacctccctagcaaactggggcacaagcttaattaacaccggtggcgcgttaagtcgacaatcaacctctggattacaaaatttgtgaaagattgactggtattcttaactatgttgctccttttacgctatgtggatacgctgctttaatgcctttgtatcatgctattgcttcccgtatggctttcattttctcctccttgtataaatcctggttgctgtctctttatgaggagttgtggcccgttgtcaggcaacgtggcgtggtgtgcactgtgtttgctgacgcaacccccactggttggggcattgccaccacctgtcagctcctttccgggactttcgctttccccctccctattgccacggcggaactcatcgccgcctgccttgcccgctgctggacaggggctcggctgttgggcactgacaattccgtggtgttgtcggggaaatcatcgtcctttccttggctgctcgcctgtgttgccacctggattctgcgcgggacgtccttctgctacgtcccttcggccctcaatccagcggaccttccttcccgcggcctgctgccggctctgcggcctcttccgcgtcttcgccttcgccctcagacgagtcggatctccctttgggccgcctccccgcgtcgactttaagaccaatgacttacaaggcagctgtagatcttagccactttttaaaagaaaaggggggactggaagggctaattcactcccaacgaagacaagatctgctttttgcttgtactgggtctctctggttagaccagatctgagcctgggagctctctggctaactagggaacccactgcttaagcctcaataaagcttgccttgagtgcttcaagtagtgtgtgcccgtctgttgtgtgactctggtaactagagatccctcagacccttttagtcagtgtggaaaatctctagcagtacgtatagtagttcatgtcatcttattattcagtatttataacttgcaaagaaatgaatatcagagagtgagaggaacttgtttattgcagcttataatggttacaaataaagcaatagcatcacaaatttcacaaataaagcatttttttcactgcattctagttgtggtttgtccaaactcatcaatgtatcttatcatgtctggctctagctatcccgcccctaactccgcccatcccgcccctaactccgcccagttccgcccattctccgccccatggctgactaattttttttatttatgcagaggccgaggccgcctcggcctctgagctattccagaagtagtgaggaggcttttttggaggcctagggacgtacccaattcgccctatagtgagtcgtattacgcgcgctcactggccgtcgttttacaacgtcgtgactgggaaaaccctggcgttacccaacttaatcgccttgcagcacatccccctttcgccagctggcgtaatagcgaagaggcccgcaccgatcgcccttcccaacagttgcgcagcctgaatggcgaatgggacgcgccctgtagcggcgcattaagcgcggcgggtgtggtggttacgcgcagcgtgaccgctacacttgccagcgccctagcgcccgctcctttcgctttcttcccttcctttctcgccacgttcgccggctttccccgtcaagctctaaatcgggggctccctttagggttccgatttagtgctttacggcacctcgaccccaaaaaacttgattagggtgatggttcacgtagtgggccatcgccctgatagacggtttttcgccctttgacgttggagtccacgttctttaatagtggactcttgttccaaactggaacaacactcaaccctatctcggtctattcttttgatttataagggattttgccgatttcggcctattggttaaaaaatgagctgatttaacaaaaatttaacgcgaattttaacaaaatattaacgcttacaatttaggtggcacttttcggggaaatgtgcgcggaacccctatttgtttatttttctaaatacattcaaatatgtatccgctcatgagacaataaccctgataaatgcttcaataatattgaaaaaggaagagtatgagtattcaacatttccgtgtcgcccttattcccttttttgcggcattttgccttcctgtttttgctcacccagaaacgctggtgaaagtaaaagatgctgaagatcagttgggtgcacgagtgggttacatcgaactggatctcaacagcggtaagatccttgagagttttcgccccgaagaacgttttccaatgatgagcacttttaaagttctgctatgtggcgcggtattatcccgtattgacgccgggcaagagcaactcggtcgccgcatacactattctcagaatgacttggttgagtactcaccagtcacagaaaagcatcttacggatggcatgacagtaagagaattatgcagtgctgccataaccatgagtgataacactgcggccaacttacttctgacaacgatcggaggaccgaaggagctaaccgcttttttgcacaacatgggggatcatgtaactcgccttgatcgttgggaaccggagctgaatgaagccataccaaacgacgagcgtgacaccacgatgcctgtagcaatggcaacaacgttgcgcaaactattaactggcgaactacttactctagcttcccggcaacaattaatagactggatggaggcggataaagttgcaggaccacttctgcgctcggcccttccggctggctggtttattgctgataaatctggagccggtgagcgtgggtctcgcggtatcattgcagcactggggccagatggtaagccctcccgtatcgtagttatctacacgacggggagtcaggcaactatggatgaacgaaatagacagatcgctgagataggtgcctcactgattaagcattggtaactgtcagaccaagtttactcatatatactttagattgatttaaaacttcatttttaatttaaaaggatctaggtgaagatcctttttgataatctcatgaccaaaatcccttaacgtgagttttcgttccactgagcgtcagaccccgtagaaaagatcaaaggatcttcttgagatcctttttttctgcgcgtaatctgctgcttgcaaacaaaaaaaccaccgctaccagcggtggtttgtttgccggatcaagagctaccaactctttttccgaaggtaactggcttcagcagagcgcagataccaaatactgttcttctagtgtagccgtagttaggccaccacttcaagaactctgtagcaccgcctacatacctcgctctgctaatcctgttaccagtggctgctgccagtggcgataagtcgtgtcttaccgggttggactcaagacgatagttaccggataaggcgcagcggtcgggctgaacggggggttcgtgcacacagcccagcttggagcgaacgacctacaccgaactgagatacctacagcgtgagctatgagaaagcgccacgcttcccgaagggagaaaggcggacaggtatccggtaagcggcagggtcggaacaggagagcgcacgagggagcttccagggggaaacgcctggtatctttatagtcctgtcgggtttcgccacctctgacttgagcgtcgatttttgtgatgctcgtcaggggggcggagcctatggaaaaacgccagcaacgcggcctttttacggttcctggccttttgctggccttttgctcacatgttctttcctgcgttatcccctgattctgtggataaccgtattaccgcctttgagtgagctgataccgctcgccgcagccgaacgaccgagcgcagcgagtcagtgagcgaggaagcggaagagcgcccaatacgcaaaccgcctctccccgcgcgttggccgattcattaatgcagctggcacgacaggtttcccgactggaaagcgggcagtgagcgcaacgcaattaatgtgagttagctcactcattaggcaccccaggctttacactttatgcttccggctcgtatgttgtgtggaattgtgagcggataacaatttcacacaggaaacagctatgaccatgattacgccaagcgcgcaattaaccctcactaaagggaacaaaagctggagctgcaagcttaatgtagtcttatgcaatactcttgtagtcttgcaacatggtaacgatgagttagcaacatgccttacaaggagagaaaaagcaccgtgcatgccgattggtggaagtaaggtggtacgatcgtgccttattaggaaggcaacagacgggtctgacatggattggacgaaccactgaattgccgcattgcagagatattgtatttaagtgcctagctcgatacataaacgggtctctctggttagaccagatctgagcctgggagctctctggctaactagggaacccactgcttaagcctcaataaagcttgccttgagtgcttcaagtagtgtgtgcccgtctgttgtgtgactctggtaactagagatccctcagacccttttagtcagtgtggaaaatctctagcagtggcgcccgaacagggacttgaaagcgaaagggaaaccagaggagctctctcgacgcaggactcggcttgctgaagcgcgcacggcaagaggcgaggggcggcgactggtgagtacgccaaaaattttgactagcggaggctagaaggagagagatgggtgcgagagcgtcagtattaagcgggggagaattagatcgcgatgggaaaaaattcggttaaggccagggggaaagaaaaaatataaattaaaacatatagtatgggcaagcagggagctagaacgattcgcagttaatcctggcctgttagaaacatcagaaggctgtagacaaatactgggacagctacaaccatcccttcagacaggatcagaagaacttagatcattatataatacagtagcaaccctctattgtgtgcatcaaaggatagagataaaagacaccaaggaagctttagacaagatagaggaagagcaaaacaaaagtaagaccaccgcacagcaagcggccgctgatcttcagacctggaggaggagatatgagggacaattggagaagtgaattatataaatataaagtagtaaaaattgaaccattaggagtagcacccaccaaggcaaagagaagagtggtgcagagagaaaaaagagcagtgggaataggagctttgttccttgggttcttgggagcagcaggaagcactatgggcgcagcgtcaatgacgctgacggtacaggccagacaattattgtctggtatagtgcagcagcagaacaatttgctgagggctattgaggcgcaacagcatctgttgcaactcacagtctggggcatcaagcagctccaggcaagaatcctggctgtggaaagatacctaaaggatcaacagctcctggggatttggggttgctctggaaaactcatttgcaccactgctgtgccttggaatgctagttggagtaataaatctctggaacagatttggaatcacacgacctggatggagtgggacagagaaattaacaattacacaagcttaatacactccttaattgaagaatcgcaaaaccagcaagaaaagaatgaacaagaattattggaattagataaatgggcaagtttgtggaattggtttaacataacaaattggctgtggtatataaaattattcataatgatagtaggaggcttggtaggtttaagaatagtttttgctgtactttctatagtgaatagagttaggcagggatattcaccattatcgtttcagacccacctcccaaccccgaggggacccttgcgccttttccaaggcagccctgggtttgcgcagggacgcggctgctctgggcgtggttccgggaaacgcagcggcgccgaccctgggtctcgcacattcttcacgtccgttcgcagcgtcacccggatcttcgccgctacccttgtgggccccccggcgacgcttcctgctccgcccctaagtcgggaaggttccttgcggttcgcggcgtgccggacgtgacaaacggaagccgcacgtctcactagtaccctcgcagacggacagcgccagggagcaatggcagcgcgccgaccgcgatgggctgtggccaatagcggctgctcagcagggcgcgccgagagcagcggccgggaaggggcggtgcgggaggcggggtgtggggcggtagtgtgggccctgttcctgcccgcgcggtgttccgcattctgcaagcctccggagcgcacgtcggcagtcggctccctcgttgaccgaatcaccgacctctctccccagggggtacccagctgtctagagaattctagatcttgagacaaatggcagtattcatccacaattttaaaagaaaaggggggattggggggtacagtgcaggggaaagaatagtagacataatagcaacagacatacaaactaaagaattacaaaaacaaattacaaaaattcaaaattttcgggtttattacagggacagcagagatccactttggcgccggctcgaggggg

SEQ ID NO: 163 - protein, 260 aa, Artificial Sequence
  Synthetic Polypeptide
MTEYKPTVRLATRDDVPRAVRTLAAAFADYPATRHTVDPDRHIERVTELQELFLTRVGLDIGKVWVADDGAAVAVWTTPESVEAGAVFAEIGPRMAELSGSRLAAQQQMEGLLAPHRPKEPAWFLATVGVSPDHQGKGLGSAVVLPGVEAAERAGVPACLSYETEILTVEYGLLPIGKIVEKRIECTVYSVDNNGNIYTQPVAQWHDRGEQEVFEYCLEDGSLIRATKDHKFMTVDGQMLPIDEIFERELDLMRVDNLPN

SEQ ID NO: 164 - DNA, 8886 bp, Artificial Sequence
  Synthetic Polynucleotide
cccggggttattaatagtaatcaattacggggtcattagttcatagcccatatatggagttccgcgttacataacttacggtaaatggcccgcctggctgaccgcccaacgacccccgcccattgacgtcaataatgacgtatgttcccatagtaacgccaatagggactttccattgacgtcaatgggtggagtatttacggtaaactgcccacttggcagtacatcaagtgtatcatatgccaagtacgccccctattgacgtcaatgacggtaaatggcccgcctggcattatgcccagtacatgaccttatgggactttcctacttggcagtacatctacgtattagtcatcgctattaccatggtgatgcggttttggcagtacatcaatgggcgtggatagcggtttgactcacggggatttccaagtctccaccccattgacgtcaatgggagtttgttttggcaccaaaatcaacgggactttccaaaatgtcgtaacaactccgccccattgacgcaaatgggcggtaggcgtgtacggtgggaggtctatataagcagagctctctggctaactgtcgggatcaacaagtttgtacaaaaaagcaggctccgaattcaccggtgccgccaccatgattaagatcgctacgcggaagtacctggggaaacagaacgtctacgacataggtgtggagcgcgatcacaactttgctctgaaaaatggatttatcgccagcaactgcttcctggagacctccgcgccccgcaacctccccttctacgagcggctcggcttcaccgtcaccgccgacgtcgaggtgcccgaaggaccgcgcacctggtgcatgacccgcaagcccggtgcctgattaattaagaattcgacccagctttcttgtacaaagtggttggtaagcctatccctaaccctctcctcggtctcgattctacgtagtaatgagctagcagtctcgaggttaacgaattccgccccccccctaacgttactggccgaagccgcttggaataaggccggtgtgcgcttgtctatatgttattttccaccatattgccgtcttttggcaatgtgagggcccggaaacctggccctgtcttcttgacgagcattcctaggggtctttcccctctcgccaaaggaatgcaaggtctgttgaatgtcgtgaaggaagcagttcctctggaagcttcttgaagacaaacaacgtctgtagcgaccctttgcaggcagcggaaccccccacctggcgacaggtgcccctgcggccaaaagccacgtgtataagatacacctgcaaaggcggcacaaccccagtgccacgttgtgagttggatagttgtggaaagagtcaaatggctctcctcaagcgtattcaacaaggggctgaaggatgcccagaaggtaccccattgtatgggatctgatctggggcctcggtgcacatgctttacatgtgtttagtcgaggttaaaaaaacgtctaggccccccgaaccacggggacgtggttttcctttgaaaaacacgataataccatggtgagcaagggcgaggaggataacatggccatcatcaaggagttcatgcgcttcaaggtgcacatggagggctccgtgaacggccacgagttcgagatcgagggcgagggcgagggccgcccctacgagggcacccagaccgccaagctgaaggtgaccaagggtggccccctgcccttcgcctgggacatcctgtcccctcagttcatgtacggctccaaggcctacgtgaagcaccccgccgacatccccgactacttgaagctgtccttccccgagggcttcaagtgggagcgcgtgatgaacttcgaggacggcggcgtggtgaccgtgacccaggactcctccctgcaggacggcgagttcatctacaaggtgaagctgcgcggcaccaacttcccctccgacggccccgtaatgcagaagaagaccatgggctgggaggcctcctccgagcggatgtaccccgaggacggcgccctgaagggcgagatcaagcagaggctgaagctgaaggacggcggccactacgacgctgaggtcaagaccacctacaaggccaagaagcccgtgcagctgcccggcgcctacaacgtcaacatcaagttggacatcacctcccacaacgaggactacaccatcgtggaacagtacgaacgcgccgagggccgccactccaccggcggcatggacgagctgtacaagtaacaccggtggcgcgttaagtcgacaatcaacctctggattacaaaatttgtgaaagattgactggtattcttaactatgttgctccttttacgctatgtggatacgctgctttaatgcctttgtatcatgctattgcttcccgtatggctttcattttctcctccttgtataaatcctggttgctgtctctttatgaggagttgtggcccgttgtcaggcaacgtggcgtggtgtgcactgtgtttgctgacgcaacccccactggttggggcattgccaccacctgtcagctcctttccgggactttcgctttccccctccctattgccacggcggaactcatcgccgcctgccttgcccgctgctggacaggggctcggctgttgggcactgacaattccgtggtgttgtcggggaaatcatcgtcctttccttggctgctcgcctgtgttgccacctggattctgcgcgggacgtccttctgctacgtcccttcggccctcaatccagcggaccttccttcccgcggcctgctgccggctctgcggcctcttccgcgtcttcgccttcgccctcagacgagtcggatctccctttgggccgcctccccgcgtcgactttaagaccaatgacttacaaggcagctgtagatcttagccactttttaaaagaaaaggggggactggaagggctaattcactcccaacgaagacaagatctgctttttgcttgtactgggtctctctggttagaccagatctgagcctgggagctctctggctaactagggaacccactgcttaagcctcaataaagcttgccttgagtgcttcaagtagtgtgtgcccgtctgttgtgtgactctggtaactagagatccctcagacccttttagtcagtgtggaaaatctctagcagtacgtatagtagttcatgtcatcttattattcagtatttataacttgcaaagaaatgaatatcagagagtgagaggaacttgtttattgcagcttataatggttacaaataaagcaatagcatcacaaatttcacaaataaagcatttttttcactgcattctagttgtggtttgtccaaactcatcaatgtatcttatcatgtctggctctagctatcccgcccctaactccgcccatcccgcccctaactccgcccagttccgcccattctccgccccatggctgactaattttttttatttatgcagaggccgaggccgcctcggcctctgagctattccagaagtagtgaggaggcttttttggaggcctagggacgtacccaattcgccctatagtgagtcgtattacgcgcgctcactggccgtcgttttacaacgtcgtgactgggaaaaccctggcgttacccaacttaatcgccttgcagcacatccccctttcgccagctggcgtaatagcgaagaggcccgcaccgatcgcccttcccaacagttgcgcagcctgaatggcgaatgggacgcgccctgtagcggcgcattaagcgcggcgggtgtggtggttacgcgcagcgtgaccgctacacttgccagcgccctagcgcccgctcctttcgctttcttcccttcctttctcgccacgttcgccggctttccccgtcaagctctaaatcgggggctccctttagggttccgatttagtgctttacggcacctcgaccccaaaaaacttgattagggtgatggttcacgtagtgggccatcgccctgatagacggtttttcgccctttgacgttggagtccacgttctttaatagtggactcttgttccaaactggaacaacactcaaccctatctcggtctattcttttgatttataagggattttgccgatttcggcctattggttaaaaaatgagctgatttaacaaaaatttaacgcgaattttaacaaaatattaacgcttacaatttaggtggcacttttcggggaaatgtgcgcggaacccctatttgtttatttttctaaatacattcaaatatgtatccgctcatgagacaataaccctgataaatgcttcaataatattgaaaaaggaagagtatgagtattcaacatttccgtgtcgcccttattcccttttttgcggcattttgccttcctgtttttgctcacccagaaacgctggtgaaagtaaaagatgctgaagatcagttgggtgcacgagtgggttacatcgaactggatctcaacagcggtaagatccttgagagttttcgccccgaagaacgttttccaatgatgagcacttttaaagttctgctatgtggcgcggtattatcccgtattgacgccgggcaagagcaactcggtcgccgcatacactattctcagaatgacttggttgagtactcaccagtcacagaaaagcatcttacggatggcatgacagtaagagaattatgcagtgctgccataaccatgagtgataacactgcggccaacttacttctgacaacgatcggaggaccgaaggagctaaccgcttttttgcacaacatgggggatcatgtaactcgccttgatcgttgggaaccggagctgaatgaagccataccaaacgacgagcgtgacaccacgatgcctgtagcaatggcaacaacgttgcgcaaactattaactggcgaactacttactctagcttcccggcaacaattaatagactggatggaggcggataaagttgcaggaccacttctgcgctcggcccttccggctggctggtttattgctgataaatctggagccggtgagcgtgggtctcgcggtatcattgcagcactggggccagatggtaagccctcccgtatcgtagttatctacacgacggggagtcaggcaactatggatgaacgaaatagacagatcgctgagataggtgcctcactgattaagcattggtaactgtcagaccaagtttactcatatatactttagattgatttaaaacttcatttttaatttaaaaggatctaggtgaagatcctttttgataatctcatgaccaaaatcccttaacgtgagttttcgttccactgagcgtcagaccccgtagaaaagatcaaaggatcttcttgagatcctttttttctgcgcgtaatctgctgcttgcaaacaaaaaaaccaccgctaccagcggtggtttgtttgccggatcaagagctaccaactctttttccgaaggtaactggcttcagcagagcgcagataccaaatactgttcttctagtgtagccgtagttaggccaccacttcaagaactctgtagcaccgcctacatacctcgctctgctaatcctgttaccagtggctgctgccagtggcgataagtcgtgtcttaccgggttggactcaagacgatagttaccggataaggcgcagcggtcgggctgaacggggggttcgtgcacacagcccagcttggagcgaacgacctacaccgaactgagatacctacagcgtgagctatgagaaagcgccacgcttcccgaagggagaaaggcggacaggtatccggtaagcggcagggtcggaacaggagagcgcacgagggagcttccagggggaaacgcctggtatctttatagtcctgtcgggtttcgccacctctgacttgagcgtcgatttttgtgatgctcgtcaggggggcggagcctatggaaaaacgccagcaacgcggcctttttacggttcctggccttttgctggccttttgctcacatgttctttcctgcgttatcccctgattctgtggataaccgtattaccgcctttgagtgagctgataccgctcgccgcagccgaacgaccgagcgcagcgagtcagtgagcgaggaagcggaagagcgcccaatacgcaaaccgcctctccccgcgcgttggccgattcattaatgcagctggcacgacaggtttcccgactggaaagcgggcagtgagcgcaacgcaattaatgtgagttagctcactcattaggcaccccaggctttacactttatgcttccggctcgtatgttgtgtggaattgtgagcggataacaatttcacacaggaaacagctatgaccatgattacgccaagcgcgcaattaaccctcactaaagggaacaaaagctggagctgcaagcttaatgtagtcttatgcaatactcttgtagtcttgcaacatggtaacgatgagttagcaacatgccttacaaggagagaaaaagcaccgtgcatgccgattggtggaagtaaggtggtacgatcgtgccttattaggaaggcaacagacgggtctgacatggattggacgaaccactgaattgccgcattgcagagatattgtatttaagtgcctagctcgatacataaacgggtctctctggttagaccagatctgagcctgggagctctctggctaactagggaacccactgcttaagcctcaataaagcttgccttgagtgcttcaagtagtgtgtgcccgtctgttgtgtgactctggtaactagagatccctcagacccttttagtcagtgtggaaaatctctagcagtggcgcccgaacagggacttgaaagcgaaagggaaaccagaggagctctctcgacgcaggactcggcttgctgaagcgcgcacggcaagaggcgaggggcggcgactggtgagtacgccaaaaattttgactagcggaggctagaaggagagagatgggtgcgagagcgtcagtattaagcgggggagaattagatcgcgatgggaaaaaattcggttaaggccagggggaaagaaaaaatataaattaaaacatatagtatgggcaagcagggagctagaacgattcgcagttaatcctggcctgttagaaacatcagaaggctgtagacaaatactgggacagctacaaccatcccttcagacaggatcagaagaacttagatcattatataatacagtagcaaccctctattgtgtgcatcaaaggatagagataaaagacaccaaggaagctttagacaagatagaggaagagcaaaacaaaagtaagaccaccgcacagcaagcggccgctgatcttcagacctggaggaggagatatgagggacaattggagaagtgaattatataaatataaagtagtaaaaattgaaccattaggagtagcacccaccaaggcaaagagaagagtggtgcagagagaaaaaagagcagtgggaataggagctttgttccttgggttcttgggagcagcaggaagcactatgggcgcagcgtcaatgacgctgacggtacaggccagacaattattgtctggtatagtgcagcagcagaacaatttgctgagggctattgaggcgcaacagcatctgttgcaactcacagtctggggcatcaagcagctccaggcaagaatcctggctgtggaaagatacctaaaggatcaacagctcctggggatttggggttgctctggaaaactcatttgcaccactgctgtgccttggaatgctagttggagtaataaatctctggaacagatttggaatcacacgacctggatggagtgggacagagaaattaacaattacacaagcttaatacactccttaattgaagaatcgcaaaaccagcaagaaaagaatgaacaagaattattggaattagataaatgggcaagtttgtggaattggtttaacataacaaattggctgtggtatataaaattattcataatgatagtaggaggcttggtaggtttaagaatagtttttgctgtactttctatagtgaatagagttaggcagggatattcaccattatcgtttcagacccacctcccaaccccgaggggacccttgcgccttttccaaggcagccctgggtttgcgcagggacgcggctgctctgggcgtggttccgggaaacgcagcggcgccgaccctgggtctcgcacattcttcacgtccgttcgcagcgtcacccggatcttcgccgctacccttgtgggccccccggcgacgcttcctgctccgcccctaagtcgggaaggttccttgcggttcgcggcgtgccggacgtgacaaacggaagccgcacgtctcactagtaccctcgcagacggacagcgccagggagcaatggcagcgcgccgaccgcgatgggctgtggccaatagcggctgctcagcagggcgcgccgagagcagcggccgggaaggggcggtgcgggaggcggggtgtggggcggtagtgtgggccctgttcctgcccgcgcggtgttccgcattctgcaagcctccggagcgcacgtcggcagtcggctccctcgttgaccgaatcaccgacctctctccccagggggtacccagctgtctagagaattctagatcttgagacaaatggcagtattcatccacaattttaaaagaaaaggggggattggggggtacagtgcaggggaaagaatagtagacataatagcaacagacatacaaactaaagaattacaaaaacaaattacaaaaattcaaaattttcgggtttattacagggacagcagagatccactttggcgccggctcgaggggg

SEQ ID NO: 165 - protein, 78 aa, Artificial Sequence
  Synthetic Polypeptide
MIKIATRKYLGKQNVYDIGVERDHNFALKNGFIASNCFLETSAPRNLPFYERLGFTVTADVEVPEGPRTWCMTRKPGA

SEQ ID NO: 166 - DNA, 9492 bp, Artificial Sequence
  Synthetic Polynucleotide
cccggggttattaatagtaatcaattacggggtcattagttcatagcccatatatggagttccgcgttacataacttacggtaaatggcccgcctggctgaccgcccaacgacccccgcccattgacgtcaataatgacgtatgttcccatagtaacgccaatagggactttccattgacgtcaatgggtggagtatttacggtaaactgcccacttggcagtacatcaagtgtatcatatgccaagtacgccccctattgacgtcaatgacggtaaatggcccgcctggcattatgcccagtacatgaccttatgggactttcctacttggcagtacatctacgtattagtcatcgctattaccatggtgatgcggttttggcagtacatcaatgggcgtggatagcggtttgactcacggggatttccaagtctccaccccattgacgtcaatgggagtttgttttggcaccaaaatcaacgggactttccaaaatgtcgtaacaactccgccccattgacgcaaatgggcggtaggcgtgtacggtgggaggtctatataagcagagctctctggctaactgtcgggatcaacaagtttgtacaaaaaagcaggctccgaattcaccggtgccaccatgaccgagtacaagcccacggtgcgcctcgccacccgcgacgacgtccccagggccgtacgcaccctcgccgccgcgttcgccgactaccccgccacgcgccacaccgtcgatccggaccgccacatcgagcgggtcaccgagctgcaagaactcttcctcacgcgcgtcgggctcgacatcggcaaggtgtgggtcgcggacgacggcgccgcggtggcggtctggaccacgccggagagcgtcgaagcgggggcggtgttcgccgagatcggcccgcgcatggccgagttgagcggttcccggctggccgcgcagcaacagatggaaggcctcctggcgccgcaccggcccaaggagcccgcgtggttcctggccaccgtcggcgtctcgcccgaccaccagggcaagggtctgggcagcgccgtcgtgctccccggagtggaggcggccgagcgcgccggggtgcccgccttcctggagacctccgcgccccgcaacctccccttctacgagcggctcggcttcaccgtcaccgcctgcctttcatacgagaccgagatcctgactgtcgagtacggattgcttcctatcggcaaaatcgtggagaagaggattgaatgtaccgtctattcagtcgataataatgggaacatctacacacagcccgtggctcaatggcacgacagaggagagcaggaagtttttgaatactgtctcgaggacggatccctcatccgcgctactaaagatcataagtttatgaccgtggacggccagatgctgccaattgacgaaatttttgaacgagagctggatctgatgagagtcgacaaccttccaaactgattaattaagaattcgacccagctttcttgtacaaagtggttggtaagcctatccctaaccctctcctcggtctcgattctacgtagtaatgagctagcagtctcgaggttaacgaattccgccccccccctaacgttactggccgaagccgcttggaataaggccggtgtgcgcttgtctatatgttattttccaccatattgccgtcttttggcaatgtgagggcccggaaacctggccctgtcttcttgacgagcattcctaggggtctttcccctctcgccaaaggaatgcaaggtctgttgaatgtcgtgaaggaagcagttcctctggaagcttcttgaagacaaacaacgtctgtagcgaccctttgcaggcagcggaaccccccacctggcgacaggtgcccctgcggccaaaagccacgtgtataagatacacctgcaaaggcggcacaaccccagtgccacgttgtgagttggatagttgtggaaagagtcaaatggctctcctcaagcgtattcaacaaggggctgaaggatgcccagaaggtaccccattgtatgggatctgatctggggcctcggtgcacatgctttacatgtgtttagtcgaggttaaaaaaacgtctaggccccccgaaccacggggacgtggttttcctttgaaaaacacgataataccatggccatgagcgagctgattaaggagaacatgcacatgaagctgtacatggagggcaccgtggacaaccatcacttcaagtgcacatccgagggcgaaggcaagccctacgagggcacccagaccatgagaatcaaggtggtcgagggcggccctctccccttcgccttcgacatcctggctactagcttcctctacggcagcaagaccttcatcaaccacacccagggcatccccgacttcttcaagcagtccttccctgagggcttcacatgggagagagtcaccacatacgaagacgggggcgtgctgaccgctacccaggacaccagcctccaggacggctgcctcatctacaacgtcaagatcagaggggtgaacttcacatccaacggccctgtgatgcagaagaaaacactcggctgggaggccttcaccgagacgctgtaccccgctgacggcggcctggaaggcagaaacgacatggccctgaagctcgtgggcgggagccatctgatcgcaaacatcaagaccacatatagatccaagaaacccgctaagaacctcaagatgcctggcgtctactatgtggactacagactggaaagaatcaaggaggccaacaacgagacctacgtcgagcagcacgaggtggcagtggccagatactgcgacctccctagcaaactggggcacaagcttaattaacaccggtggcgcgttaagtcgacaatcaacctctggattacaaaatttgtgaaagattgactggtattcttaactatgttgctccttttacgctatgtggatacgctgctttaatgcctttgtatcatgctattgcttcccgtatggctttcattttctcctccttgtataaatcctggttgctgtctctttatgaggagttgtggcccgttgtcaggcaacgtggcgtggtgtgcactgtgtttgctgacgcaacccccactggttggggcattgccaccacctgtcagctcctttccgggactttcgctttccccctccctattgccacggcggaactcatcgccgcctgccttgcccgctgctggacaggggctcggctgttgggcactgacaattccgtggtgttgtcggggaaatcatcgtcctttccttggctgctcgcctgtgttgccacctggattctgcgcgggacgtccttctgctacgtcccttcggccctcaatccagcggaccttccttcccgcggcctgctgccggctctgcggcctcttccgcgtcttcgccttcgccctcagacgagtcggatctccctttgggccgcctccccgcgtcgactttaagaccaatgacttacaaggcagctgtagatcttagccactttttaaaagaaaaggggggactggaagggctaattcactcccaacgaagacaagatctgctttttgcttgtactgggtctctctggttagaccagatctgagcctgggagctctctggctaactagggaacccactgcttaagcctcaataaagcttgccttgagtgcttcaagtagtgtgtgcccgtctgttgtgtgactctggtaactagagatccctcagacccttttagtcagtgtggaaaatctctagcagtacgtatagtagttcatgtcatcttattattcagtatttataacttgcaaagaaatgaatatcagagagtgagaggaacttgtttattgcagcttataatggttacaaataaagcaatagcatcacaaatttcacaaataaagcatttttttcactgcattctagttgtggtttgtccaaactcatcaatgtatcttatcatgtctggctctagctatcccgcccctaactccgcccatcccgcccctaactccgcccagttccgcccattctccgccccatggctgactaattttttttatttatgcagaggccgaggccgcctcggcctctgagctattccagaagtagtgaggaggcttttttggaggcctagggacgtacccaattcgccctatagtgagtcgtattacgcgcgctcactggccgtcgttttacaacgtcgtgactgggaaaaccctggcgttacccaacttaatcgccttgcagcacatccccctttcgccagctggcgtaatagcgaagaggcccgcaccgatcgcccttcccaacagttgcgcagcctgaatggcgaatgggacgcgccctgtagcggcgcattaagcgcggcgggtgtggtggttacgcgcagcgtgaccgctacacttgccagcgccctagcgcccgctcctttcgctttcttcccttcctttctcgccacgttcgccggctttccccgtcaagctctaaatcgggggctccctttagggttccgatttagtgctttacggcacctcgaccccaaaaaacttgattagggtgatggttcacgtagtgggccatcgccctgatagacggtttttcgccctttgacgttggagtccacgttctttaatagtggactcttgttccaaactggaacaacactcaaccctatctcggtctattcttttgatttataagggattttgccgatttcggcctattggttaaaaaatgagctgatttaacaaaaatttaacgcgaattttaacaaaatattaacgcttacaatttaggtggcacttttcggggaaatgtgcgcggaacccctatttgtttatttttctaaatacattcaaatatgtatccgctcatgagacaataaccctgataaatgcttcaataatattgaaaaaggaagagtatgagtattcaacatttccgtgtcgcccttattcccttttttgcggcattttgccttcctgtttttgctcacccagaaacgctggtgaaagtaaaagatgctgaagatcagttgggtgcacgagtgggttacatcgaactggatctcaacagcggtaagatccttgagagttttcgccccgaagaacgttttccaatgatgagcacttttaaagttctgctatgtggcgcggtattatcccgtattgacgccgggcaagagcaactcggtcgccgcatacactattctcagaatgacttggttgagtactcaccagtcacagaaaagcatcttacggatggcatgacagtaagagaattatgcagtgctgccataaccatgagtgataacactgcggccaacttacttctgacaacgatcggaggaccgaaggagctaaccgcttttttgcacaacatgggggatcatgtaactcgccttgatcgttgggaaccggagctgaatgaagccataccaaacgacgagcgtgacaccacgatgcctgtagcaatggcaacaacgttgcgcaaactattaactggcgaactacttactctagcttcccggcaacaattaatagactggatggaggcggataaagttgcaggaccacttctgcgctcggcccttccggctggctggtttattgctgataaatctggagccggtgagcgtgggtctcgcggtatcattgcagcactggggccagatggtaagccctcccgtatcgtagttatctacacgacggggagtcaggcaactatggatgaacgaaatagacagatcgctgagataggtgcctcactgattaagcattggtaactgtcagaccaagtttactcatatatactttagattgatttaaaacttcatttttaatttaaaaggatctaggtgaagatcctttttgataatctcatgaccaaaatcccttaacgtgagttttcgttccactgagcgtcagaccccgtagaaaagatcaaaggatcttcttgagatcctttttttctgcgcgtaatctgctgcttgcaaacaaaaaaaccaccgctaccagcggtggtttgtttgccggatcaagagctaccaactctttttccgaaggtaactggcttcagcagagcgcagataccaaatactgttcttctagtgtagccgtagttaggccaccacttcaagaactctgtagcaccgcctacatacctcgctctgctaatcctgttaccagtggctgctgccagtggcgataagtcgtgtcttaccgggttggactcaagacgatagttaccggataaggcgcagcggtcgggctgaacggggggttcgtgcacacagcccagcttggagcgaacgacctacaccgaactgagatacctacagcgtgagctatgagaaagcgccacgcttcccgaagggagaaaggcggacaggtatccggtaagcggcagggtcggaacaggagagcgcacgagggagcttccagggggaaacgcctggtatctttatagtcctgtcgggtttcgccacctctgacttgagcgtcgatttttgtgatgctcgtcaggggggcggagcctatggaaaaacgccagcaacgcggcctttttacggttcctggccttttgctggccttttgctcacatgttctttcctgcgttatcccctgattctgtggataaccgtattaccgcctttgagtgagctgataccgctcgccgcagccgaacgaccgagcgcagcgagtcagtgagcgaggaagcggaagagcgcccaatacgcaaaccgcctctccccgcgcgttggccgattcattaatgcagctggcacgacaggtttcccgactggaaagcgggcagtgagcgcaacgcaattaatgtgagttagctcactcattaggcaccccaggctttacactttatgcttccggctcgtatgttgtgtggaattgtgagcggataacaatttcacacaggaaacagctatgaccatgattacgccaagcgcgcaattaaccctcactaaagggaacaaaagctggagctgcaagcttaatgtagtcttatgcaatactcttgtagtcttgcaacatggtaacgatgagttagcaacatgccttacaaggagagaaaaagcaccgtgcatgccgattggtggaagtaaggtggtacgatcgtgccttattaggaaggcaacagacgggtctgacatggattggacgaaccactgaattgccgcattgcagagatattgtatttaagtgcctagctcgatacataaacgggtctctctggttagaccagatctgagcctgggagctctctggctaactagggaacccactgcttaagcctcaataaagcttgccttgagtgcttcaagtagtgtgtgcccgtctgttgtgtgactctggtaactagagatccctcagacccttttagtcagtgtggaaaatctctagcagtggcgcccgaacagggacttgaaagcgaaagggaaaccagaggagctctctcgacgcaggactcggcttgctgaagcgcgcacggcaagaggcgaggggcggcgactggtgagtacgccaaaaattttgactagcggaggctagaaggagagagatgggtgcgagagcgtcagtattaagcgggggagaattagatcgcgatgggaaaaaattcggttaaggccagggggaaagaaaaaatataaattaaaacatatagtatgggcaagcagggagctagaacgattcgcagttaatcctggcctgttagaaacatcagaaggctgtagacaaatactgggacagctacaaccatcccttcagacaggatcagaagaacttagatcattatataatacagtagcaaccctctattgtgtgcatcaaaggatagagataaaagacaccaaggaagctttagacaagatagaggaagagcaaaacaaaagtaagaccaccgcacagcaagcggccgctgatcttcagacctggaggaggagatatgagggacaattggagaagtgaattatataaatataaagtagtaaaaattgaaccattaggagtagcacccaccaaggcaaagagaagagtggtgcagagagaaaaaagagcagtgggaataggagctttgttccttgggttcttgggagcagcaggaagcactatgggcgcagcgtcaatgacgctgacggtacaggccagacaattattgtctggtatagtgcagcagcagaacaatttgctgagggctattgaggcgcaacagcatctgttgcaactcacagtctggggcatcaagcagctccaggcaagaatcctggctgtggaaagatacctaaaggatcaacagctcctggggatttggggttgctctggaaaactcatttgcaccactgctgtgccttggaatgctagttggagtaataaatctctggaacagatttggaatcacacgacctggatggagtgggacagagaaattaacaattacacaagcttaatacactccttaattgaagaatcgcaaaaccagcaagaaaagaatgaacaagaattattggaattagataaatgggcaagtttgtggaattggtttaacataacaaattggctgtggtatataaaattattcataatgatagtaggaggcttggtaggtttaagaatagtttttgctgtactttctatagtgaatagagttaggcagggatattcaccattatcgtttcagacccacctcccaaccccgaggggacccttgcgccttttccaaggcagccctgggtttgcgcagggacgcggctgctctgggcgtggttccgggaaacgcagcggcgccgaccctgggtctcgcacattcttcacgtccgttcgcagcgtcacccggatcttcgccgctacccttgtgggccccccggcgacgcttcctgctccgcccctaagtcgggaaggttccttgcggttcgcggcgtgccggacgtgacaaacggaagccgcacgtctcactagtaccctcgcagacggacagcgccagggagcaatggcagcgcgccgaccgcgatgggctgtggccaatagcggctgctcagcagggcgcgccgagagcagcggccgggaaggggcggtgcgggaggcggggtgtggggcggtagtgtgggccctgttcctgcccgcgcggtgttccgcattctgcaagcctccggagcgcacgtcggcagtcggctccctcgttgaccgaatcaccgacctctctccccagggggtacccagctgtctagagaattctagatcttgagacaaatggcagtattcatccacaattttaaaagaaaaggggggattggggggtacagtgcaggggaaagaatagtagacataatagcaacagacatacaaactaaagaattacaaaaacaaattacaaaaattcaaaattttcgggtttattacagggacagcagagatccactttggcgccggctcgaggggg

SEQ ID NO: 167 - protein, 282 aa, Artificial Sequence
  Synthetic Polypeptide
MTEYKPTVRLATRDDVPRAVRTLAAAFADYPATRHTVDPDRHIERVTELQELFLTRVGLDIGKVWVADDGAAVAVWTTPESVEAGAVFAEIGPRMAELSGSRLAAQQQMEGLLAPHRPKEPAWFLATVGVSPDHQGKGLGSAVVLPGVEAAERAGVPAFLETSAPRNLPFYERLGFTVTACLSYETEILTVEYGLLPIGKIVEKRIECTVYSVDNNGNIYTQPVAQWHDRGEQEVFEYCLEDGSLIRATKDHKFMTVDGQMLPIDEIFERELDLMRVDNLPN

SEQ ID NO: 168 - DNA, 8820 bp, Artificial Sequence
  Synthetic Polynucleotide
cccggggttattaatagtaatcaattacggggtcattagttcatagcccatatatggagttccgcgttacataacttacggtaaatggcccgcctggctgaccgcccaacgacccccgcccattgacgtcaataatgacgtatgttcccatagtaacgccaatagggactttccattgacgtcaatgggtggagtatttacggtaaactgcccacttggcagtacatcaagtgtatcatatgccaagtacgccccctattgacgtcaatgacggtaaatggcccgcctggcattatgcccagtacatgaccttatgggactttcctacttggcagtacatctacgtattagtcatcgctattaccatggtgatgcggttttggcagtacatcaatgggcgtggatagcggtttgactcacggggatttccaagtctccaccccattgacgtcaatgggagtttgttttggcaccaaaatcaacgggactttccaaaatgtcgtaacaactccgccccattgacgcaaatgggcggtaggcgtgtacggtgggaggtctatataagcagagctctctggctaactgtcgggatcaacaagtttgtacaaaaaagcaggctccgaattcaccggtgccgccaccatgattaagatcgctacgcggaagtacctggggaaacagaacgtctacgacataggtgtggagcgcgatcacaactttgctctgaaaaatggatttatcgccagcaactgcgacgtcgaggtgcccgaaggaccgcgcacctggtgcatgacccgcaagcccggtgcctgattaattaagaattcgacccagctttcttgtacaaagtggttggtaagcctatccctaaccctctcctcggtctcgattctacgtagtaatgagctagcagtctcgaggttaacgaattccgccccccccctaacgttactggccgaagccgcttggaataaggccggtgtgcgcttgtctatatgttattttccaccatattgccgtcttttggcaatgtgagggcccggaaacctggccctgtcttcttgacgagcattcctaggggtctttcccctctcgccaaaggaatgcaaggtctgttgaatgtcgtgaaggaagcagttcctctggaagcttcttgaagacaaacaacgtctgtagcgaccctttgcaggcagcggaaccccccacctggcgacaggtgcccctgcggccaaaagccacgtgtataagatacacctgcaaaggcggcacaaccccagtgccacgttgtgagttggatagttgtggaaagagtcaaatggctctcctcaagcgtattcaacaaggggctgaaggatgcccagaaggtaccccattgtatgggatctgatctggggcctcggtgcacatgctttacatgtgtttagtcgaggttaaaaaaacgtctaggccccccgaaccacggggacgtggttttcctttgaaaaacacgataataccatggtgagcaagggcgaggaggataacatggccatcatcaaggagttcatgcgcttcaaggtgcacatggagggctccgtgaacggccacgagttcgagatcgagggcgagggcgagggccgcccctacgagggcacccagaccgccaagctgaaggtgaccaagggtggccccctgcccttcgcctgggacatcctgtcccctcagttcatgtacggctccaaggcctacgtgaagcaccccgccgacatccccgactacttgaagctgtccttccccgagggcttcaagtgggagcgcgtgatgaacttcgaggacggcggcgtggtgaccgtgacccaggactcctccctgcaggacggcgagttcatctacaaggtgaagctgcgcggcaccaacttcccctccgacggccccgtaatgcagaagaagaccatgggctgggaggcctcctccgagcggatgtaccccgaggacggcgccctgaagggcgagatcaagcagaggctgaagctgaaggacggcggccactacgacgctgaggtcaagaccacctacaaggccaagaagcccgtgcagctgcccggcgcctacaacgtcaacatcaagttggacatcacctcccacaacgaggactacaccatcgtggaacagtacgaacgcgccgagggccgccactccaccggcggcatggacgagctgtacaagtaacaccggtggcgcgttaagtcgacaatcaacctctggattacaaaatttgtgaaagattgactggtattcttaactatgttgctccttttacgctatgtggatacgctgctttaatgcctttgtatcatgctattgcttcccgtatggctttcattttctcctccttgtataaatcctggttgctgtctctttatgaggagttgtggcccgttgtcaggcaacgtggcgtggtgtgcactgtgtttgctgacgcaacccccactggttggggcattgccaccacctgtcagctcctttccgggactttcgctttccccctccctattgccacggcggaactcatcgccgcctgccttgcccgctgctggacaggggctcggctgttgggcactgacaattccgtggtgttgtcggggaaatcatcgtcctttccttggctgctcgcctgtgttgccacctggattctgcgcgggacgtccttctgctacgtcccttcggccctcaatccagcggaccttccttcccgcggcctgctgccggctctgcggcctcttccgcgtcttcgccttcgccctcagacgagtcggatctccctttgggccgcctccccgcgtcgactttaagaccaatgacttacaaggcagctgtagatcttagccactttttaaaagaaaaggggggactggaagggctaattcactcccaacgaagacaagatctgctttttgcttgtactgggtctctctggttagaccagatctgagcctgggagctctctggctaactagggaacccactgcttaagcctcaataaagcttgccttgagtgcttcaagtagtgtgtgcccgtctgttgtgtgactctggtaactagagatccctcagacccttttagtcagtgtggaaaatctctagcagtacgtatagtagttcatgtcatcttattattcagtatttataacttgcaaagaaatgaatatcagagagtgagaggaacttgtttattgcagcttataatggttacaaataaagcaatagcatcacaaatttcacaaataaagcatttttttcactgcattctagttgtggtttgtccaaactcatcaatgtatcttatcatgtctggctctagctatcccgcccctaactccgcccatcccgcccctaactccgcccagttccgcccattctccgccccatggctgactaattttttttatttatgcagaggccgaggccgcctcggcctctgagctattccagaagtagtgaggaggcttttttggaggcctagggacgtacccaattcgccctatagtgagtcgtattacgcgcgctcactggccgtcgttttacaacgtcgtgactgggaaaaccctggcgttacccaacttaatcgccttgcagcacatccccctttcgccagctggcgtaatagcgaagaggcccgcaccgatcgcccttcccaacagttgcgcagcctgaatggcgaatgggacgcgccctgtagcggcgcattaagcgcggcgggtgtggtggttacgcgcagcgtgaccgctacacttgccagcgccctagcgcccgctcctttcgctttcttcccttcctttctcgccacgttcgccggctttccccgtcaagctctaaatcgggggctccctttagggttccgatttagtgctttacggcacctcgaccccaaaaaacttgattagggtgatggttcacgtagtgggccatcgccctgatagacggtttttcgccctttgacgttggagtccacgttctttaatagtggactcttgttccaaactggaacaacactcaaccctatctcggtctattcttttgatttataagggattttgccgatttcggcctattggttaaaaaatgagctgatttaacaaaaatttaacgcgaattttaacaaaatattaacgcttacaatttaggtggcacttttcggggaaatgtgcgcggaacccctatttgtttatttttctaaatacattcaaatatgtatccgctcatgagacaataaccctgataaatgcttcaataatattgaaaaaggaagagtatgagtattcaacatttccgtgtcgcccttattcccttttttgcggcattttgccttcctgtttttgctcacccagaaacgctggtgaaagtaaaagatgctgaagatcagttgggtgcacgagtgggttacatcgaactggatctcaacagcggtaagatccttgagagttttcgccccgaagaacgttttccaatgatgagcacttttaaagttctgctatgtggcgcggtattatcccgtattgacgccgggcaagagcaactcggtcgccgcatacactattctcagaatgacttggttgagtactcaccagtcacagaaaagcatcttacggatggcatgacagtaagagaattatgcagtgctgccataaccatgagtgataacactgcggccaacttacttctgacaacgatcggaggaccgaaggagctaaccgcttttttgcacaacatgggggatcatgtaactcgccttgatcgttgggaaccggagctgaatgaagccataccaaacgacgagcgtgacaccacgatgcctgtagcaatggcaacaacgttgcgcaaactattaactggcgaactacttactctagcttcccggcaacaattaatagactggatggaggcggataaagttgcaggaccacttctgcgctcggcccttccggctggctggtttattgctgataaatctggagccggtgagcgtgggtctcgcggtatcattgcagcactggggccagatggtaagccctcccgtatcgtagttatctacacgacggggagtcaggcaactatggatgaacgaaatagacagatcgctgagataggtgcctcactgattaagcattggtaactgtcagaccaagtttactcatatatactttagattgatttaaaacttcatttttaatttaaaaggatctaggtgaagatcctttttgataatctcatgaccaaaatcccttaacgtgagttttcgttccactgagcgtcagaccccgtagaaaagatcaaaggatcttcttgagatcctttttttctgcgcgtaatctgctgcttgcaaacaaaaaaaccaccgctaccagcggtggtttgtttgccggatcaagagctaccaactctttttccgaaggtaactggcttcagcagagcgcagataccaaatactgttcttctagtgtagccgtagttaggccaccacttcaagaactctgtagcaccgcctacatacctcgctctgctaatcctgttaccagtggctgctgccagtggcgataagtcgtgtcttaccgggttggactcaagacgatagttaccggataaggcgcagcggtcgggctgaacggggggttcgtgcacacagcccagcttggagcgaacgacctacaccgaactgagatacctacagcgtgagctatgagaaagcgccacgcttcccgaagggagaaaggcggacaggtatccggtaagcggcagggtcggaacaggagagcgcacgagggagcttccagggggaaacgcctggtatctttatagtcctgtcgggtttcgccacctctgacttgagcgtcgatttttgtgatgctcgtcaggggggcggagcctatggaaaaacgccagcaacgcggcctttttacggttcctggccttttgctggccttttgctcacatgttctttcctgcgttatcccctgattctgtggataaccgtattaccgcctttgagtgagctgataccgctcgccgcagccgaacgaccgagcgcagcgagtcagtgagcgaggaagcggaagagcgcccaatacgcaaaccgcctctccccgcgcgttggccgattcattaatgcagctggcacgacaggtttcccgactggaaagcgggcagtgagcgcaacgcaattaatgtgagttagctcactcattaggcaccccaggctttacactttatgcttccggctcgtatgttgtgtggaattgtgagcggataacaatttcacacaggaaacagctatgaccatgattacgccaagcgcgcaattaaccctcactaaagggaacaaaagctggagctgcaagcttaatgtagtcttatgcaatactcttgtagtcttgcaacatggtaacgatgagttagcaacatgccttacaaggagagaaaaagcaccgtgcatgccgattggtggaagtaaggtggtacgatcgtgccttattaggaaggcaacagacgggtctgacatggattggacgaaccactgaattgccgcattgcagagatattgtatttaagtgcctagctcgatacataaacgggtctctctggttagaccagatctgagcctgggagctctctggctaactagggaacccactgcttaagcctcaataaagcttgccttgagtgcttcaagtagtgtgtgcccgtctgttgtgtgactctggtaactagagatccctcagacccttttagtcagtgtggaaaatctctagcagtggcgcccgaacagggacttgaaagcgaaagggaaaccagaggagctctctcgacgcaggactcggcttgctgaagcgcgcacggcaagaggcgaggggcggcgactggtgagtacgccaaaaattttgactagcggaggctagaaggagagagatgggtgcgagagcgtcagtattaagcgggggagaattagatcgcgatgggaaaaaattcggttaaggccagggggaaagaaaaaatataaattaaaacatatagtatgggcaagcagggagctagaacgattcgcagttaatcctggcctgttagaaacatcagaaggctgtagacaaatactgggacagctacaaccatcccttcagacaggatcagaagaacttagatcattatataatacagtagcaaccctctattgtgtgcatcaaaggatagagataaaagacaccaaggaagctttagacaagatagaggaagagcaaaacaaaagtaagaccaccgcacagcaagcggccgctgatcttcagacctggaggaggagatatgagggacaattggagaagtgaattatataaatataaagtagtaaaaattgaaccattaggagtagcacccaccaaggcaaagagaagagtggtgcagagagaaaaaagagcagtgggaataggagctttgttccttgggttcttgggagcagcaggaagcactatgggcgcagcgtcaatgacgctgacggtacaggccagacaattattgtctggtatagtgcagcagcagaacaatttgctgagggctattgaggcgcaacagcatctgttgcaactcacagtctggggcatcaagcagctccaggcaagaatcctggctgtggaaagatacctaaaggatcaacagctcctggggatttggggttgctctggaaaactcatttgcaccactgctgtgccttggaatgctagttggagtaataaatctctggaacagatttggaatcacacgacctggatggagtgggacagagaaattaacaattacacaagcttaatacactccttaattgaagaatcgcaaaaccagcaagaaaagaatgaacaagaattattggaattagataaatgggcaagtttgtggaattggtttaacataacaaattggctgtggtatataaaattattcataatgatagtaggaggcttggtaggtttaagaatagtttttgctgtactttctatagtgaatagagttaggcagggatattcaccattatcgtttcagacccacctcccaaccccgaggggacccttgcgccttttccaaggcagccctgggtttgcgcagggacgcggctgctctgggcgtggttccgggaaacgcagcggcgccgaccctgggtctcgcacattcttcacgtccgttcgcagcgtcacccggatcttcgccgctacccttgtgggccccccggcgacgcttcctgctccgcccctaagtcgggaaggttccttgcggttcgcggcgtgccggacgtgacaaacggaagccgcacgtctcactagtaccctcgcagacggacagcgccagggagcaatggcagcgcgccgaccgcgatgggctgtggccaatagcggctgctcagcagggcgcgccgagagcagcggccgggaaggggcggtgcgggaggcggggtgtggggcggtagtgtgggccctgttcctgcccgcgcggtgttccgcattctgcaagcctccggagcgcacgtcggcagtcggctccctcgttgaccgaatcaccgacctctctccccagggggtacccagctgtctagagaattctagatcttgagacaaatggcagtattcatccacaattttaaaagaaaaggggggattggggggtacagtgcaggggaaagaatagtagacataatagcaacagacatacaaactaaagaattacaaaaacaaattacaaaaattcaaaattttcgggtttattacagggacagcagagatccactttggcgccggctcgaggggg

SEQ ID NO: 169 - protein, 56 aa, Artificial Sequence
  Synthetic Polypeptide
MIKIATRKYLGKQNVYDIGVERDHNFALKNGFIASNCDVEVPEGPRTWCMTRKPGA

SEQ ID NO: 170 - DNA, 9129 bp, Artificial Sequence
  Synthetic Polynucleotide
cccggggttattaatagtaatcaattacggggtcattagttcatagcccatatatggagttccgcgttacataacttacggtaaatggcccgcctggctgaccgcccaacgacccccgcccattgacgtcaataatgacgtatgttcccatagtaacgccaatagggactttccattgacgtcaatgggtggagtatttacggtaaactgcccacttggcagtacatcaagtgtatcatatgccaagtacgccccctattgacgtcaatgacggtaaatggcccgcctggcattatgcccagtacatgaccttatgggactttcctacttggcagtacatctacgtattagtcatcgctattaccatggtgatgcggttttggcagtacatcaatgggcgtggatagcggtttgactcacggggatttccaagtctccaccccattgacgtcaatgggagtttgttttggcaccaaaatcaacgggactttccaaaatgtcgtaacaactccgccccattgacgcaaatgggcggtaggcgtgtacggtgggaggtctatataagcagagctctctggctaactgtcgggatcaacaagtttgtacaaaaaagcaggctccgaattcaccggtgccgccaccatgaaaacatttaacatttctcaacaggatctagaattagtagaagtagcgacagagaagattacaatgctttatgaggataataaacatcatgtgggagcggcaattcgtacgaaaacaggagaaatcatttcggcagtacatattgaagcgtatataggacgagtaactgtttgcctttcatacgagaccgagatcctgactgtcgagtacggattgcttcctatcggcaaaatcgtggagaagaggattgaatgtaccgtctattcagtcgataataatgggaacatctacacacagcccgtggctcaatggcacgacagaggagagcaggaagtttttgaatactgtctcgaggacggatccctcatccgcgctactaaagatcataagtttatgaccgtggacggccagatgctgccaattgacgaaatttttgaacgagagctggatctgatgagagtcgacaaccttccaaactgattaattaagaattcgacccagctttcttgtacaaagtggttggtaagcctatccctaaccctctcctcggtctcgattctacgtagtaatgagctagcagtctcgaggttaacgaattccgccccccccctaacgttactggccgaagccgcttggaataaggccggtgtgcgcttgtctatatgttattttccaccatattgccgtcttttggcaatgtgagggcccggaaacctggccctgtcttcttgacgagcattcctaggggtctttcccctctcgccaaaggaatgcaaggtctgttgaatgtcgtgaaggaagcagttcctctggaagcttcttgaagacaaacaacgtctgtagcgaccctttgcaggcagcggaaccccccacctggcgacaggtgcccctgcggccaaaagccacgtgtataagatacacctgcaaaggcggcacaaccccagtgccacgttgtgagttggatagttgtggaaagagtcaaatggctctcctcaagcgtattcaacaaggggctgaaggatgcccagaaggtaccccattgtatgggatctgatctggggcctcggtgcacatgctttacatgtgtttagtcgaggttaaaaaaacgtctaggccccccgaaccacggggacgtggttttcctttgaaaaacacgataataccatggccatgagcgagctgattaaggagaacatgcacatgaagctgtacatggagggcaccgtggacaaccatcacttcaagtgcacatccgagggcgaaggcaagccctacgagggcacccagaccatgagaatcaaggtggtcgagggcggccctctccccttcgccttcgacatcctggctactagcttcctctacggcagcaagaccttcatcaaccacacccagggcatccccgacttcttcaagcagtccttccctgagggcttcacatgggagagagtcaccacatacgaagacgggggcgtgctgaccgctacccaggacaccagcctccaggacggctgcctcatctacaacgtcaagatcagaggggtgaacttcacatccaacggccctgtgatgcagaagaaaacactcggctgggaggccttcaccgagacgctgtaccccgctgacggcggcctggaaggcagaaacgacatggccctgaagctcgtgggcgggagccatctgatcgcaaacatcaagaccacatatagatccaagaaacccgctaagaacctcaagatgcctggcgtctactatgtggactacagactggaaagaatcaaggaggccaacaacgagacctacgtcgagcagcacgaggtggcagtggccagatactgcgacctccctagcaaactggggcacaagcttaattaacaccggtggcgcgttaagtcgacaatcaacctctggattacaaaatttgtgaaagattgactggtattcttaactatgttgctccttttacgctatgtggatacgctgctttaatgcctttgtatcatgctattgcttcccgtatggctttcattttctcctccttgtataaatcctggttgctgtctctttatgaggagttgtggcccgttgtcaggcaacgtggcgtggtgtgcactgtgtttgctgacgcaacccccactggttggggcattgccaccacctgtcagctcctttccgggactttcgctttccccctccctattgccacggcggaactcatcgccgcctgccttgcccgctgctggacaggggctcggctgttgggcactgacaattccgtggtgttgtcggggaaatcatcgtcctttccttggctgctcgcctgtgttgccacctggattctgcgcgggacgtccttctgctacgtcccttcggccctcaatccagcggaccttccttcccgcggcctgctgccggctctgcggcctcttccgcgtcttcgccttcgccctcagacgagtcggatctccctttgggccgcctccccgcgtcgactttaagaccaatgacttacaaggcagctgtagatcttagccactttttaaaagaaaaggggggactggaagggctaattcactcccaacgaagacaagatctgctttttgcttgtactgggtctctctggttagaccagatctgagcctgggagctctctggctaactagggaacccactgcttaagcctcaataaagcttgccttgagtgcttcaagtagtgtgtgcccgtctgttgtgtgactctggtaactagagatccctcagacccttttagtcagtgtggaaaatctctagcagtacgtatagtagttcatgtcatcttattattcagtatttataacttgcaaagaaatgaatatcagagagtgagaggaacttgtttattgcagcttataatggttacaaataaagcaatagcatcacaaatttcacaaataaagcatttttttcactgcattctagttgtggtttgtccaaactcatcaatgtatcttatcatgtctggctctagctatcccgcccctaactccgcccatcccgcccctaactccgcccagttccgcccattctccgccccatggctgactaattttttttatttatgcagaggccgaggccgcctcggcctctgagctattccagaagtagtgaggaggcttttttggaggcctagggacgtacccaattcgccctatagtgagtcgtattacgcgcgctcactggccgtcgttttacaacgtcgtgactgggaaaaccctggcgttacccaacttaatcgccttgcagcacatccccctttcgccagctggcgtaatagcgaagaggcccgcaccgatcgcccttcccaacagttgcgcagcctgaatggcgaatgggacgcgccctgtagcggcgcattaagcgcggcgggtgtggtggttacgcgcagcgtgaccgctacacttgccagcgccctagcgcccgctcctttcgctttcttcccttcctttctcgccacgttcgccggctttccccgtcaagctctaaatcgggggctccctttagggttccgatttagtgctttacggcacctcgaccccaaaaaacttgattagggtgatggttcacgtagtgggccatcgccctgatagacggtttttcgccctttgacgttggagtccacgttctttaatagtggactcttgttccaaactggaacaacactcaaccctatctcggtctattcttttgatttataagggattttgccgatttcggcctattggttaaaaaatgagctgatttaacaaaaatttaacgcgaattttaacaaaatattaacgcttacaatttaggtggcacttttcggggaaatgtgcgcggaacccctatttgtttatttttctaaatacattcaaatatgtatccgctcatgagacaataaccctgataaatgcttcaataatattgaaaaaggaagagtatgagtattcaacatttccgtgtcgcccttattcccttttttgcggcattttgccttcctgtttttgctcacccagaaacgctggtgaaagtaaaagatgctgaagatcagttgggtgcacgagtgggttacatcgaactggatctcaacagcggtaagatccttgagagttttcgccccgaagaacgttttccaatgatgagcacttttaaagttctgctatgtggcgcggtattatcccgtattgacgccgggcaagagcaactcggtcgccgcatacactattctcagaatgacttggttgagtactcaccagtcacagaaaagcatcttacggatggcatgacagtaagagaattatgcagtgctgccataaccatgagtgataacactgcggccaacttacttctgacaacgatcggaggaccgaaggagctaaccgcttttttgcacaacatgggggatcatgtaactcgccttgatcgttgggaaccggagctgaatgaagccataccaaacgacgagcgtgacaccacgatgcctgtagcaatggcaacaacgttgcgcaaactattaactggcgaactacttactctagcttcccggcaacaattaatagactggatggaggcggataaagttgcaggaccacttctgcgctcggcccttccggctggctggtttattgctgataaatctggagccggtgagcgtgggtctcgcggtatcattgcagcactggggccagatggtaagccctcccgtatcgtagttatctacacgacggggagtcaggcaactatggatgaacgaaatagacagatcgctgagataggtgcctcactgattaagcattggtaactgtcagaccaagtttactcatatatactttagattgatttaaaacttcatttttaatttaaaaggatctaggtgaagatcctttttgataatctcatgaccaaaatcccttaacgtgagttttcgttccactgagcgtcagaccccgtagaaaagatcaaaggatcttcttgagatcctttttttctgcgcgtaatctgctgcttgcaaacaaaaaaaccaccgctaccagcggtggtttgtttgccggatcaagagctaccaactctttttccgaaggtaactggcttcagcagagcgcagataccaaatactgttcttctagtgtagccgtagttaggccaccacttcaagaactctgtagcaccgcctacatacctcgctctgctaatcctgttaccagtggctgctgccagtggcgataagtcgtgtcttaccgggttggactcaagacgatagttaccggataaggcgcagcggtcgggctgaacggggggttcgtgcacacagcccagcttggagcgaacgacctacaccgaactgagatacctacagcgtgagctatgagaaagcgccacgcttcccgaagggagaaaggcggacaggtatccggtaagcggcagggtcggaacaggagagcgcacgagggagcttccagggggaaacgcctggtatctttatagtcctgtcgggtttcgccacctctgacttgagcgtcgatttttgtgatgctcgtcaggggggcggagcctatggaaaaacgccagcaacgcggcctttttacggttcctggccttttgctggccttttgctcacatgttctttcctgcgttatcccctgattctgtggataaccgtattaccgcctttgagtgagctgataccgctcgccgcagccgaacgaccgagcgcagcgagtcagtgagcgaggaagcggaagagcgcccaatacgcaaaccgcctctccccgcgcgttggccgattcattaatgcagctggcacgacaggtttcccgactggaaagcgggcagtgagcgcaacgcaattaatgtgagttagctcactcattaggcaccccaggctttacactttatgcttccggctcgtatgttgtgtggaattgtgagcggataacaatttcacacaggaaacagctatgaccatgattacgccaagcgcgcaattaaccctcactaaagggaacaaaagctggagctgcaagcttaatgtagtcttatgcaatactcttgtagtcttgcaacatggtaacgatgagttagcaacatgccttacaaggagagaaaaagcaccgtgcatgccgattggtggaagtaaggtggtacgatcgtgccttattaggaaggcaacagacgggtctgacatggattggacgaaccactgaattgccgcattgcagagatattgtatttaagtgcctagctcgatacataaacgggtctctctggttagaccagatctgagcctgggagctctctggctaactagggaacccactgcttaagcctcaataaagcttgccttgagtgcttcaagtagtgtgtgcccgtctgttgtgtgactctggtaactagagatccctcagacccttttagtcagtgtggaaaatctctagcagtggcgcccgaacagggacttgaaagcgaaagggaaaccagaggagctctctcgacgcaggactcggcttgctgaagcgcgcacggcaagaggcgaggggcggcgactggtgagtacgccaaaaattttgactagcggaggctagaaggagagagatgggtgcgagagcgtcagtattaagcgggggagaattagatcgcgatgggaaaaaattcggttaaggccagggggaaagaaaaaatataaattaaaacatatagtatgggcaagcagggagctagaacgattcgcagttaatcctggcctgttagaaacatcagaaggctgtagacaaatactgggacagctacaaccatcccttcagacaggatcagaagaacttagatcattatataatacagtagcaaccctctattgtgtgcatcaaaggatagagataaaagacaccaaggaagctttagacaagatagaggaagagcaaaacaaaagtaagaccaccgcacagcaagcggccgctgatcttcagacctggaggaggagatatgagggacaattggagaagtgaattatataaatataaagtagtaaaaattgaaccattaggagtagcacccaccaaggcaaagagaagagtggtgcagagagaaaaaagagcagtgggaataggagctttgttccttgggttcttgggagcagcaggaagcactatgggcgcagcgtcaatgacgctgacggtacaggccagacaattattgtctggtatagtgcagcagcagaacaatttgctgagggctattgaggcgcaacagcatctgttgcaactcacagtctggggcatcaagcagctccaggcaagaatcctggctgtggaaagatacctaaaggatcaacagctcctggggatttggggttgctctggaaaactcatttgcaccactgctgtgccttggaatgctagttggagtaataaatctctggaacagatttggaatcacacgacctggatggagtgggacagagaaattaacaattacacaagcttaatacactccttaattgaagaatcgcaaaaccagcaagaaaagaatgaacaagaattattggaattagataaatgggcaagtttgtggaattggtttaacataacaaattggctgtggtatataaaattattcataatgatagtaggaggcttggtaggtttaagaatagtttttgctgtactttctatagtgaatagagttaggcagggatattcaccattatcgtttcagacccacctcccaaccccgaggggacccttgcgccttttccaaggcagccctgggtttgcgcagggacgcggctgctctgggcgtggttccgggaaacgcagcggcgccgaccctgggtctcgcacattcttcacgtccgttcgcagcgtcacccggatcttcgccgctacccttgtgggccccccggcgacgcttcctgctccgcccctaagtcgggaaggttccttgcggttcgcggcgtgccggacgtgacaaacggaagccgcacgtctcactagtaccctcgcagacggacagcgccagggagcaatggcagcgcgccgaccgcgatgggctgtggccaatagcggctgctcagcagggcgcgccgagagcagcggccgggaaggggcggtgcgggaggcggggtgtggggcggtagtgtgggccctgttcctgcccgcgcggtgttccgcattctgcaagcctccggagcgcacgtcggcagtcggctccctcgttgaccgaatcaccgacctctctccccagggggtacccagctgtctagagaattctagatcttgagacaaatggcagtattcatccacaattttaaaagaaaaggggggattggggggtacagtgcaggggaaagaatagtagacataatagcaacagacatacaaactaaagaattacaaaaacaaattacaaaaattcaaaattttcgggtttattacagggacagcagagatccactttggcgccggctcgaggggg

SEQ ID NO: 171 - protein, 160 aa, Artificial Sequence
  Synthetic Polypeptide
MKTFNISQQDLELVEVATEKITMLYEDNKHHVGAAIRTKTGEIISAVHIEAYIGRVTVCLSYETEILTVEYGLLPIGKIVEKRIECTVYSVDNNGNIYTQPVAQWHDRGEQEVFEYCLEDGSLIRATKDHKFMTVDGQMLPIDEIFERELDLMRVDNLPN

SEQ ID NO: 172 - DNA, 9006 bp, Artificial Sequence
  Synthetic Polynucleotide
cccggggttattaatagtaatcaattacggggtcattagttcatagcccatatatggagttccgcgttacataacttacggtaaatggcccgcctggctgaccgcccaacgacccccgcccattgacgtcaataatgacgtatgttcccatagtaacgccaatagggactttccattgacgtcaatgggtggagtatttacggtaaactgcccacttggcagtacatcaagtgtatcatatgccaagtacgccccctattgacgtcaatgacggtaaatggcccgcctggcattatgcccagtacatgaccttatgggactttcctacttggcagtacatctacgtattagtcatcgctattaccatggtgatgcggttttggcagtacatcaatgggcgtggatagcggtttgactcacggggatttccaagtctccaccccattgacgtcaatgggagtttgttttggcaccaaaatcaacgggactttccaaaatgtcgtaacaactccgccccattgacgcaaatgggcggtaggcgtgtacggtgggaggtctatataagcagagctctctggctaactgtcgggatcaacaagtttgtacaaaaaagcaggctccgaattcaccggtgccgccaccatgattaagatcgctacgcggaagtacctggggaaacagaacgtctacgacataggtgtggagcgcgatcacaactttgctctgaaaaatggatttatcgccagcaactgtgcagaagccattgcgattggtagtgcagtttcgaatggacaaaaggattttgacacgattgtagctgttagacacccttattctgacgaagtagatagaagtattcgagtggtaagtccttgtggtatgtgtagggagttgatttcagactatgcaccagattgttttgtgttaatagaaatgaatggcaagttagtcaaaactacgattgaagaactcattccactcaaatatacccgaaattaattaattaagaattcgacccagctttcttgtacaaagtggttggtaagcctatccctaaccctctcctcggtctcgattctacgtagtaatgagctagcagtctcgaggttaacgaattccgccccccccctaacgttactggccgaagccgcttggaataaggccggtgtgcgcttgtctatatgttattttccaccatattgccgtcttttggcaatgtgagggcccggaaacctggccctgtcttcttgacgagcattcctaggggtctttcccctctcgccaaaggaatgcaaggtctgttgaatgtcgtgaaggaagcagttcctctggaagcttcttgaagacaaacaacgtctgtagcgaccctttgcaggcagcggaaccccccacctggcgacaggtgcccctgcggccaaaagccacgtgtataagatacacctgcaaaggcggcacaaccccagtgccacgttgtgagttggatagttgtggaaagagtcaaatggctctcctcaagcgtattcaacaaggggctgaaggatgcccagaaggtaccccattgtatgggatctgatctggggcctcggtgcacatgctttacatgtgtttagtcgaggttaaaaaaacgtctaggccccccgaaccacggggacgtggttttcctttgaaaaacacgataataccatggtgagcaagggcgaggaggataacatggccatcatcaaggagttcatgcgcttcaaggtgcacatggagggctccgtgaacggccacgagttcgagatcgagggcgagggcgagggccgcccctacgagggcacccagaccgccaagctgaaggtgaccaagggtggccccctgcccttcgcctgggacatcctgtcccctcagttcatgtacggctccaaggcctacgtgaagcaccccgccgacatccccgactacttgaagctgtccttccccgagggcttcaagtgggagcgcgtgatgaacttcgaggacggcggcgtggtgaccgtgacccaggactcctccctgcaggacggcgagttcatctacaaggtgaagctgcgcggcaccaacttcccctccgacggccccgtaatgcagaagaagaccatgggctgggaggcctcctccgagcggatgtaccccgaggacggcgccctgaagggcgagatcaagcagaggctgaagctgaaggacggcggccactacgacgctgaggtcaagaccacctacaaggccaagaagcccgtgcagctgcccggcgcctacaacgtcaacatcaagttggacatcacctcccacaacgaggactacaccatcgtggaacagtacgaacgcgccgagggccgccactccaccggcggcatggacgagctgtacaagtaacaccggtggcgcgttaagtcgacaatcaacctctggattacaaaatttgtgaaagattgactggtattcttaactatgttgctccttttacgctatgtggatacgctgctttaatgcctttgtatcatgctattgcttcccgtatggctttcattttctcctccttgtataaatcctggttgctgtctctttatgaggagttgtggcccgttgtcaggcaacgtggcgtggtgtgcactgtgtttgctgacgcaacccccactggttggggcattgccaccacctgtcagctcctttccgggactttcgctttccccctccctattgccacggcggaactcatcgccgcctgccttgcccgctgctggacaggggctcggctgttgggcactgacaattccgtggtgttgtcggggaaatcatcgtcctttccttggctgctcgcctgtgttgccacctggattctgcgcgggacgtccttctgctacgtcccttcggccctcaatccagcggaccttccttcccgcggcctgctgccggctctgcggcctcttccgcgtcttcgccttcgccctcagacgagtcggatctccctttgggccgcctccccgcgtcgactttaagaccaatgacttacaaggcagctgtagatcttagccactttttaaaagaaaaggggggactggaagggctaattcactcccaacgaagacaagatctgctttttgcttgtactgggtctctctggttagaccagatctgagcctgggagctctctggctaactagggaacccactgcttaagcctcaataaagcttgccttgagtgcttcaagtagtgtgtgcccgtctgttgtgtgactctggtaactagagatccctcagacccttttagtcagtgtggaaaatctctagcagtacgtatagtagttcatgtcatcttattattcagtatttataacttgcaaagaaatgaatatcagagagtgagaggaacttgtttattgcagcttataatggttacaaataaagcaatagcatcacaaatttcacaaataaagcatttttttcactgcattctagttgtggtttgtccaaactcatcaatgtatcttatcatgtctggctctagctatcccgcccctaactccgcccatcccgcccctaactccgcccagttccgcccattctccgccccatggctgactaattttttttatttatgcagaggccgaggccgcctcggcctctgagctattccagaagtagtgaggaggcttttttggaggcctagggacgtacccaattcgccctatagtgagtcgtattacgcgcgctcactggccgtcgttttacaacgtcgtgactgggaaaaccctggcgttacccaacttaatcgccttgcagcacatccccctttcgccagctggcgtaatagcgaagaggcccgcaccgatcgcccttcccaacagttgcgcagcctgaatggcgaatgggacgcgccctgtagcggcgcattaagcgcggcgggtgtggtggttacgcgcagcgtgaccgctacacttgccagcgccctagcgcccgctcctttcgctttcttcccttcctttctcgccacgttcgccggctttccccgtcaagctctaaatcgggggctccctttagggttccgatttagtgctttacggcacctcgaccccaaaaaacttgattagggtgatggttcacgtagtgggccatcgccctgatagacggtttttcgccctttgacgttggagtccacgttctttaatagtggactcttgttccaaactggaacaacactcaaccctatctcggtctattcttttgatttataagggattttgccgatttcggcctattggttaaaaaatgagctgatttaacaaaaatttaacgcgaattttaacaaaatattaacgcttacaatttaggtggcacttttcggggaaatgtgcgcggaacccctatttgtttatttttctaaatacattcaaatatgtatccgctcatgagacaataaccctgataaatgcttcaataatattgaaaaaggaagagtatgagtattcaacatttccgtgtcgcccttattcccttttttgcggcattttgccttcctgtttttgctcacccagaaacgctggtgaaagtaaaagatgctgaagatcagttgggtgcacgagtgggttacatcgaactggatctcaacagcggtaagatccttgagagttttcgccccgaagaacgttttccaatgatgagcacttttaaagttctgctatgtggcgcggtattatcccgtattgacgccgggcaagagcaactcggtcgccgcatacactattctcagaatgacttggttgagtactcaccagtcacagaaaagcatcttacggatggcatgacagtaagagaattatgcagtgctgccataaccatgagtgataacactgcggccaacttacttctgacaacgatcggaggaccgaaggagctaaccgcttttttgcacaacatgggggatcatgtaactcgccttgatcgttgggaaccggagctgaatgaagccataccaaacgacgagcgtgacaccacgatgcctgtagcaatggcaacaacgttgcgcaaactattaactggcgaactacttactctagcttcccggcaacaattaatagactggatggaggcggataaagttgcaggaccacttctgcgctcggcccttccggctggctggtttattgctgataaatctggagccggtgagcgtgggtctcgcggtatcattgcagcactggggccagatggtaagccctcccgtatcgtagttatctacacgacggggagtcaggcaactatggatgaacgaaatagacagatcgctgagataggtgcctcactgattaagcattggtaactgtcagaccaagtttactcatatatactttagattgatttaaaacttcatttttaatttaaaaggatctaggtgaagatcctttttgataatctcatgaccaaaatcccttaacgtgagttttcgttccactgagcgtcagaccccgtagaaaagatcaaaggatcttcttgagatcctttttttctgcgcgtaatctgctgcttgcaaacaaaaaaaccaccgctaccagcggtggtttgtttgccggatcaagagctaccaactctttttccgaaggtaactggcttcagcagagcgcagataccaaatactgttcttctagtgtagccgtagttaggccaccacttcaagaactctgtagcaccgcctacatacctcgctctgctaatcctgttaccagtggctgctgccagtggcgataagtcgtgtcttaccgggttggactcaagacgatagttaccggataaggcgcagcggtcgggctgaacggggggttcgtgcacacagcccagcttggagcgaacgacctacaccgaactgagatacctacagcgtgagctatgagaaagcgccacgcttcccgaagggagaaaggcggacaggtatccggtaagcggcagggtcggaacaggagagcgcacgagggagcttccagggggaaacgcctggtatctttatagtcctgtcgggtttcgccacctctgacttgagcgtcgatttttgtgatgctcgtcaggggggcggagcctatggaaaaacgccagcaacgcggcctttttacggttcctggccttttgctggccttttgctcacatgttctttcctgcgttatcccctgattctgtggataaccgtattaccgcctttgagtgagctgataccgctcgccgcagccgaacgaccgagcgcagcgagtcagtgagcgaggaagcggaagagcgcccaatacgcaaaccgcctctccccgcgcgttggccgattcattaatgcagctggcacgacaggtttcccgactggaaagcgggcagtgagcgcaacgcaattaatgtgagttagctcactcattaggcaccccaggctttacactttatgcttccggctcgtatgttgtgtggaattgtgagcggataacaatttcacacaggaaacagctatgaccatgattacgccaagcgcgcaattaaccctcactaaagggaacaaaagctggagctgcaagcttaatgtagtcttatgcaatactcttgtagtcttgcaacatggtaacgatgagttagcaacatgccttacaaggagagaaaaagcaccgtgcatgccgattggtggaagtaaggtggtacgatcgtgccttattaggaaggcaacagacgggtctgacatggattggacgaaccactgaattgccgcattgcagagatattgtatttaagtgcctagctcgatacataaacgggtctctctggttagaccagatctgagcctgggagctctctggctaactagggaacccactgcttaagcctcaataaagcttgccttgagtgcttcaagtagtgtgtgcccgtctgttgtgtgactctggtaactagagatccctcagacccttttagtcagtgtggaaaatctctagcagtggcgcccgaacagggacttgaaagcgaaagggaaaccagaggagctctctcgacgcaggactcggcttgctgaagcgcgcacggcaagaggcgaggggcggcgactggtgagtacgccaaaaattttgactagcggaggctagaaggagagagatgggtgcgagagcgtcagtattaagcgggggagaattagatcgcgatgggaaaaaattcggttaaggccagggggaaagaaaaaatataaattaaaacatatagtatgggcaagcagggagctagaacgattcgcagttaatcctggcctgttagaaacatcagaaggctgtagacaaatactgggacagctacaaccatcccttcagacaggatcagaagaacttagatcattatataatacagtagcaaccctctattgtgtgcatcaaaggatagagataaaagacaccaaggaagctttagacaagatagaggaagagcaaaacaaaagtaagaccaccgcacagcaagcggccgctgatcttcagacctggaggaggagatatgagggacaattggagaagtgaattatataaatataaagtagtaaaaattgaaccattaggagtagcacccaccaaggcaaagagaagagtggtgcagagagaaaaaagagcagtgggaataggagctttgttccttgggttcttgggagcagcaggaagcactatgggcgcagcgtcaatgacgctgacggtacaggccagacaattattgtctggtatagtgcagcagcagaacaatttgctgagggctattgaggcgcaacagcatctgttgcaactcacagtctggggcatcaagcagctccaggcaagaatcctggctgtggaaagatacctaaaggatcaacagctcctggggatttggggttgctctggaaaactcatttgcaccactgctgtgccttggaatgctagttggagtaataaatctctggaacagatttggaatcacacgacctggatggagtgggacagagaaattaacaattacacaagcttaatacactccttaattgaagaatcgcaaaaccagcaagaaaagaatgaacaagaattattggaattagataaatgggcaagtttgtggaattggtttaacataacaaattggctgtggtatataaaattattcataatgatagtaggaggcttggtaggtttaagaatagtttttgctgtactttctatagtgaatagagttaggcagggatattcaccattatcgtttcagacccacctcccaaccccgaggggacccttgcgccttttccaaggcagccctgggtttgcgcagggacgcggctgctctgggcgtggttccgggaaacgcagcggcgccgaccctgggtctcgcacattcttcacgtccgttcgcagcgtcacccggatcttcgccgctacccttgtgggccccccggcgacgcttcctgctccgcccctaagtcgggaaggttccttgcggttcgcggcgtgccggacgtgacaaacggaagccgcacgtctcactagtaccctcgcagacggacagcgccagggagcaatggcagcgcgccgaccgcgatgggctgtggccaatagcggctgctcagcagggcgcgccgagagcagcggccgggaaggggcggtgcgggaggcggggtgtggggcggtagtgtgggccctgttcctgcccgcgcggtgttccgcattctgcaagcctccggagcgcacgtcggcagtcggctccctcgttgaccgaatcaccgacctctctccccagggggtacccagctgtctagagaattctagatcttgagacaaatggcagtattcatccacaattttaaaagaaaaggggggattggggggtacagtgcaggggaaagaatagtagacataatagcaacagacatacaaactaaagaattacaaaaacaaattacaaaaattcaaaattttcgggtttattacagggacagcagagatccactttggcgccggctcgaggggg

SEQ ID NO: 173 - protein, 118 aa, Artificial Sequence
  Synthetic Polypeptide
MIKIATRKYLGKQNVYDIGVERDHNFALKNGFIASNCAEAIAIGSAVSNGQKDFDTIVAVRHPYSDEVDRSIRVVSPCGMCRELISDYAPDCFVLIEMNGKLVKTTIEELIPLKYTRN

SEQ ID NO: 174 - DNA, 9531 bp, Artificial Sequence
  Synthetic Polynucleotide
cccggggttattaatagtaatcaattacggggtcattagttcatagcccatatatggagttccgcgttacataacttacggtaaatggcccgcctggctgaccgcccaacgacccccgcccattgacgtcaataatgacgtatgttcccatagtaacgccaatagggactttccattgacgtcaatgggtggagtatttacggtaaactgcccacttggcagtacatcaagtgtatcatatgccaagtacgccccctattgacgtcaatgacggtaaatggcccgcctggcattatgcccagtacatgaccttatgggactttcctacttggcagtacatctacgtattagtcatcgctattaccatggtgatgcggttttggcagtacatcaatgggcgtggatagcggtttgactcacggggatttccaagtctccaccccattgacgtcaatgggagtttgttttggcaccaaaatcaacgggactttccaaaatgtcgtaacaactccgccccattgacgcaaatgggcggtaggcgtgtacggtgggaggtctatataagcagagctctctggctaactgtcgggatcaacaagtttgtacaaaaaagcaggctccgaattcaccggtgccgccaccatgattaagatcgctacgcggaagtacctggggaaacagaacgtctacgacataggtgtggagcgcgatcacaactttgctctgaaaaatggatttatcgccagcaactgcgccgatggtttctacaaagatcgttatgtttatcggcactttgcatcggccgcgctcccgattccggaagtgcttgacattggggaatttagcgagagcctgacctattgcatctcccgccgtgcacagggtgtcacgttgcaagacctgcctgaaaccgaactgcccgctgttctgcagccggtcgcggaggccatggatgcgatcgctgcggccgatcttagccagacgagcgggttcggcccattcggaccgcaaggaatcggtcaatacactacatggcgtgatttcatatgcgcgattgctgatccccatgtgtatcactggcaaactgtgatggacgacaccgtcagtgcgtccgtcgcgcaggctctcgatgagctgatgctttgggccgaggactgccccgaagtccggcacctcgtgcacgcggatttcggctgtatcagtggcgactccctgatctcactcgcaagcactggaaagcgagttagcatcaaggacttgctggacgaaaaggatttcgaaatttgggcaatcaatgagcagaccatgaaactggagtctgcaaaggtgtcccgggtgttttgcacgggtaagaagcttgtttatatccttaaaactagactgggccggacgatcaaagccaccgcgaaccacagattcttgacaatcgacgggtggaaacggctggacgaactgagcttgaaggagcacatcgcccttcctcggaagctcgagtcatcttccctgcagctgtgattaattaagaattcgacccagctttcttgtacaaagtggttggtaagcctatccctaaccctctcctcggtctcgattctacgtagtaatgagctagcagtctcgaggttaacgaattccgccccccccctaacgttactggccgaagccgcttggaataaggccggtgtgcgcttgtctatatgttattttccaccatattgccgtcttttggcaatgtgagggcccggaaacctggccctgtcttcttgacgagcattcctaggggtctttcccctctcgccaaaggaatgcaaggtctgttgaatgtcgtgaaggaagcagttcctctggaagcttcttgaagacaaacaacgtctgtagcgaccctttgcaggcagcggaaccccccacctggcgacaggtgcccctgcggccaaaagccacgtgtataagatacacctgcaaaggcggcacaaccccagtgccacgttgtgagttggatagttgtggaaagagtcaaatggctctcctcaagcgtattcaacaaggggctgaaggatgcccagaaggtaccccattgtatgggatctgatctggggcctcggtgcacatgctttacatgtgtttagtcgaggttaaaaaaacgtctaggccccccgaaccacggggacgtggttttcctttgaaaaacacgataataccatggtgagcaagggcgaggagctgttcaccggggtggtgcccatcctggtcgagctggacggcgacgtaaacggccacaagttcagcgtgtccggcgagggcgagggcgatgccacctacggcaagctgaccctgaagttcatctgcaccaccggcaagctgcccgtgccctggcccaccctcgtgaccaccctgacctacggcgtgcagtgcttcagccgctaccccgaccacatgaagcagcacgacttcttcaagtccgccatgcccgaaggctacgtccaggagcgcaccatcttcttcaaggacgacggcaactacaagacccgcgccgaggtgaagttcgagggcgacaccctggtgaaccgcatcgagctgaagggcatcgacttcaaggaggacggcaacatcctggggcacaagctggagtacaactacaacagccacaacgtctatatcatggccgacaagcagaagaacggcatcaaggtgaacttcaagatccgccacaacatcgaggacggcagcgtgcagctcgccgaccactaccagcagaacacccccatcggcgacggccccgtgctgctgcccgacaaccactacctgagcacccagtccgccctgagcaaagaccccaacgagaagcgcgatcacatggtcctgctggagttcgtgaccgccgccgggatcactctcggcatggacgagctgtacaagtaacaccggtggcgcgttaagtcgacaatcaacctctggattacaaaatttgtgaaagattgactggtattcttaactatgttgctccttttacgctatgtggatacgctgctttaatgcctttgtatcatgctattgcttcccgtatggctttcattttctcctccttgtataaatcctggttgctgtctctttatgaggagttgtggcccgttgtcaggcaacgtggcgtggtgtgcactgtgtttgctgacgcaacccccactggttggggcattgccaccacctgtcagctcctttccgggactttcgctttccccctccctattgccacggcggaactcatcgccgcctgccttgcccgctgctggacaggggctcggctgttgggcactgacaattccgtggtgttgtcggggaaatcatcgtcctttccttggctgctcgcctgtgttgccacctggattctgcgcgggacgtccttctgctacgtcccttcggccctcaatccagcggaccttccttcccgcggcctgctgccggctctgcggcctcttccgcgtcttcgccttcgccctcagacgagtcggatctccctttgggccgcctccccgcgtcgactttaagaccaatgacttacaaggcagctgtagatcttagccactttttaaaagaaaaggggggactggaagggctaattcactcccaacgaagacaagatctgctttttgcttgtactgggtctctctggttagaccagatctgagcctgggagctctctggctaactagggaacccactgcttaagcctcaataaagcttgccttgagtgcttcaagtagtgtgtgcccgtctgttgtgtgactctggtaactagagatccctcagacccttttagtcagtgtggaaaatctctagcagtacgtatagtagttcatgtcatcttattattcagtatttataacttgcaaagaaatgaatatcagagagtgagaggaacttgtttattgcagcttataatggttacaaataaagcaatagcatcacaaatttcacaaataaagcatttttttcactgcattctagttgtggtttgtccaaactcatcaatgtatcttatcatgtctggctctagctatcccgcccctaactccgcccatcccgcccctaactccgcccagttccgcccattctccgccccatggctgactaattttttttatttatgcagaggccgaggccgcctcggcctctgagctattccagaagtagtgaggaggcttttttggaggcctagggacgtacccaattcgccctatagtgagtcgtattacgcgcgctcactggccgtcgttttacaacgtcgtgactgggaaaaccctggcgttacccaacttaatcgccttgcagcacatccccctttcgccagctggcgtaatagcgaagaggcccgcaccgatcgcccttcccaacagttgcgcagcctgaatggcgaatgggacgcgccctgtagcggcgcattaagcgcggcgggtgtggtggttacgcgcagcgtgaccgctacacttgccagcgccctagcgcccgctcctttcgctttcttcccttcctttctcgccacgttcgccggctttccccgtcaagctctaaatcgggggctccctttagggttccgatttagtgctttacggcacctcgaccccaaaaaacttgattagggtgatggttcacgtagtgggccatcgccctgatagacggtttttcgccctttgacgttggagtccacgttctttaatagtggactcttgttccaaactggaacaacactcaaccctatctcggtctattcttttgatttataagggattttgccgatttcggcctattggttaaaaaatgagctgatttaacaaaaatttaacgcgaattttaacaaaatattaacgcttacaatttaggtggcacttttcggggaaatgtgcgcggaacccctatttgtttatttttctaaatacattcaaatatgtatccgctcatgagacaataaccctgataaatgcttcaataatattgaaaaaggaagagtatgagtattcaacatttccgtgtcgcccttattcccttttttgcggcattttgccttcctgtttttgctcacccagaaacgctggtgaaagtaaaagatgctgaagatcagttgggtgcacgagtgggttacatcgaactggatctcaacagcggtaagatccttgagagttttcgccccgaagaacgttttccaatgatgagcacttttaaagttctgctatgtggcgcggtattatcccgtattgacgccgggcaagagcaactcggtcgccgcatacactattctcagaatgacttggttgagtactcaccagtcacagaaaagcatcttacggatggcatgacagtaagagaattatgcagtgctgccataaccatgagtgataacactgcggccaacttacttctgacaacgatcggaggaccgaaggagctaaccgcttttttgcacaacatgggggatcatgtaactcgccttgatcgttgggaaccggagctgaatgaagccataccaaacgacgagcgtgacaccacgatgcctgtagcaatggcaacaacgttgcgcaaactattaactggcgaactacttactctagcttcccggcaacaattaatagactggatggaggcggataaagttgcaggaccacttctgcgctcggcccttccggctggctggtttattgctgataaatctggagccggtgagcgtgggtctcgcggtatcattgcagcactggggccagatggtaagccctcccgtatcgtagttatctacacgacggggagtcaggcaactatggatgaacgaaatagacagatcgctgagataggtgcctcactgattaagcattggtaactgtcagaccaagtttactcatatatactttagattgatttaaaacttcatttttaatttaaaaggatctaggtgaagatcctttttgataatctcatgaccaaaatcccttaacgtgagttttcgttccactgagcgtcagaccccgtagaaaagatcaaaggatcttcttgagatcctttttttctgcgcgtaatctgctgcttgcaaacaaaaaaaccaccgctaccagcggtggtttgtttgccggatcaagagctaccaactctttttccgaaggtaactggcttcagcagagcgcagataccaaatactgttcttctagtgtagccgtagttaggccaccacttcaagaactctgtagcaccgcctacatacctcgctctgctaatcctgttaccagtggctgctgccagtggcgataagtcgtgtcttaccgggttggactcaagacgatagttaccggataaggcgcagcggtcgggctgaacggggggttcgtgcacacagcccagcttggagcgaacgacctacaccgaactgagatacctacagcgtgagctatgagaaagcgccacgcttcccgaagggagaaaggcggacaggtatccggtaagcggcagggtcggaacaggagagcgcacgagggagcttccagggggaaacgcctggtatctttatagtcctgtcgggtttcgccacctctgacttgagcgtcgatttttgtgatgctcgtcaggggggcggagcctatggaaaaacgccagcaacgcggcctttttacggttcctggccttttgctggccttttgctcacatgttctttcctgcgttatcccctgattctgtggataaccgtattaccgcctttgagtgagctgataccgctcgccgcagccgaacgaccgagcgcagcgagtcagtgagcgaggaagcggaagagcgcccaatacgcaaaccgcctctccccgcgcgttggccgattcattaatgcagctggcacgacaggtttcccgactggaaagcgggcagtgagcgcaacgcaattaatgtgagttagctcactcattaggcaccccaggctttacactttatgcttccggctcgtatgttgtgtggaattgtgagcggataacaatttcacacaggaaacagctatgaccatgattacgccaagcgcgcaattaaccctcactaaagggaacaaaagctggagctgcaagcttaatgtagtcttatgcaatactcttgtagtcttgcaacatggtaacgatgagttagcaacatgccttacaaggagagaaaaagcaccgtgcatgccgattggtggaagtaaggtggtacgatcgtgccttattaggaaggcaacagacgggtctgacatggattggacgaaccactgaattgccgcattgcagagatattgtatttaagtgcctagctcgatacataaacgggtctctctggttagaccagatctgagcctgggagctctctggctaactagggaacccactgcttaagcctcaataaagcttgccttgagtgcttcaagtagtgtgtgcccgtctgttgtgtgactctggtaactagagatccctcagacccttttagtcagtgtggaaaatctctagcagtggcgcccgaacagggacttgaaagcgaaagggaaaccagaggagctctctcgacgcaggactcggcttgctgaagcgcgcacggcaagaggcgaggggcggcgactggtgagtacgccaaaaattttgactagcggaggctagaaggagagagatgggtgcgagagcgtcagtattaagcgggggagaattagatcgcgatgggaaaaaattcggttaaggccagggggaaagaaaaaatataaattaaaacatatagtatgggcaagcagggagctagaacgattcgcagttaatcctggcctgttagaaacatcagaaggctgtagacaaatactgggacagctacaaccatcccttcagacaggatcagaagaacttagatcattatataatacagtagcaaccctctattgtgtgcatcaaaggatagagataaaagacaccaaggaagctttagacaagatagaggaagagcaaaacaaaagtaagaccaccgcacagcaagcggccgctgatcttcagacctggaggaggagatatgagggacaattggagaagtgaattatataaatataaagtagtaaaaattgaaccattaggagtagcacccaccaaggcaaagagaagagtggtgcagagagaaaaaagagcagtgggaataggagctttgttccttgggttcttgggagcagcaggaagcactatgggcgcagcgtcaatgacgctgacggtacaggccagacaattattgtctggtatagtgcagcagcagaacaatttgctgagggctattgaggcgcaacagcatctgttgcaactcacagtctggggcatcaagcagctccaggcaagaatcctggctgtggaaagatacctaaaggatcaacagctcctggggatttggggttgctctggaaaactcatttgcaccactgctgtgccttggaatgctagttggagtaataaatctctggaacagatttggaatcacacgacctggatggagtgggacagagaaattaacaattacacaagcttaatacactccttaattgaagaatcgcaaaaccagcaagaaaagaatgaacaagaattattggaattagataaatgggcaagtttgtggaattggtttaacataacaaattggctgtggtatataaaattattcataatgatagtaggaggcttggtaggtttaagaatagtttttgctgtactttctatagtgaatagagttaggcagggatattcaccattatcgtttcagacccacctcccaaccccgaggggacccttgcgccttttccaaggcagccctgggtttgcgcagggacgcggctgctctgggcgtggttccgggaaacgcagcggcgccgaccctgggtctcgcacattcttcacgtccgttcgcagcgtcacccggatcttcgccgctacccttgtgggccccccggcgacgcttcctgctccgcccctaagtcgggaaggttccttgcggttcgcggcgtgccggacgtgacaaacggaagccgcacgtctcactagtaccctcgcagacggacagcgccagggagcaatggcagcgcgccgaccgcgatgggctgtggccaatagcggctgctcagcagggcgcgccgagagcagcggccgggaaggggcggtgcgggaggcggggtgtggggcggtagtgtgggccctgttcctgcccgcgcggtgttccgcattctgcaagcctccggagcgcacgtcggcagtcggctccctcgttgaccgaatcaccgacctctctccccagggggtacccagctgtctagagaattctagatcttgagacaaatggcagtattcatccacaattttaaaagaaaaggggggattggggggtacagtgcaggggaaagaatagtagacataatagcaacagacatacaaactaaagaattacaaaaacaaattacaaaaattcaaaattttcgggtttattacagggacagcagagatccactttggcgccggctcgaggggg

SEQ ID NO: 175 - protein, 290 aa, Artificial Sequence
  Synthetic Polypeptide
MIKIATRKYLGKQNVYDIGVERDHNFALKNGFIASNCADGFYKDRYVYRHFASAALPIPEVLDIGEFSESLTYCISRRAQGVTLQDLPETELPAVLQPVAEAMDAIAAADLSQTSGFGPFGPQGIGQYTTWRDFICAIADPHVYHWQTVMDDTVSASVAQALDELMLWAEDCPEVRHLVHADFGCISGDSLISLASTGKRVSIKDLLDEKDFEIWAINEQTMKLESAKVSRVFCTGKKLVYILKTRLGRTIKATANHRFLTIDGWKRLDELSLKEHIALPRKLESSSLQL

SEQ ID NO: 176 - DNA, 9222 bp, Artificial Sequence
  Synthetic Polynucleotide
cccggggttattaatagtaatcaattacggggtcattagttcatagcccatatatggagttccgcgttacataacttacggtaaatggcccgcctggctgaccgcccaacgacccccgcccattgacgtcaataatgacgtatgttcccatagtaacgccaatagggactttccattgacgtcaatgggtggagtatttacggtaaactgcccacttggcagtacatcaagtgtatcatatgccaagtacgccccctattgacgtcaatgacggtaaatggcccgcctggcattatgcccagtacatgaccttatgggactttcctacttggcagtacatctacgtattagtcatcgctattaccatggtgatgcggttttggcagtacatcaatgggcgtggatagcggtttgactcacggggatttccaagtctccaccccattgacgtcaatgggagtttgttttggcaccaaaatcaacgggactttccaaaatgtcgtaacaactccgccccattgacgcaaatgggcggtaggcgtgtacggtgggaggtctatataagcagagctctctggctaactgtcgggatcaacaagtttgtacaaaaaagcaggctccgaattcaccggtgccgccaccatgagtcccgaaatcgaaaagctctctcagagcgatatatattgggactccatcgtaagcataacagagacgggggtcgaggaggtgttcgatctgacagttcctgggcctcataatttcgtagcgaacgacatcattgtacataactccaacaatgtcctgacggacaatggccgcataacagcggtcattgactggagcgaggcgatgttcggggattcccaatacgaggtcgccaacatcttcttctggaggccgtggttggcttgtatggagcagcagacgcgctacttcgagcggaggcatccggagcttgcaggatcgccgcggctccgggcgtatatgctccgcattggtcttgaccaactctatcagagcttggttgacggcaatttcgatgatgcagcttgggcgcagggtcgatgcgacgcaatcgtccgatccggagccgggactgtcgggcgtacacaaatcgcccgcagaagcgcggccgtctggaccgatggctgtgtagaagtactcgccgatagtggaaaccgacgccccagcactcgtccgagggcaaaggaatagttaattaagaattcgacccagctttcttgtacaaagtggttggtaagcctatccctaaccctctcctcggtctcgattctacgtagtaatgagctagcagtctcgaggttaacgaattccgccccccccctaacgttactggccgaagccgcttggaataaggccggtgtgcgcttgtctatatgttattttccaccatattgccgtcttttggcaatgtgagggcccggaaacctggccctgtcttcttgacgagcattcctaggggtctttcccctctcgccaaaggaatgcaaggtctgttgaatgtcgtgaaggaagcagttcctctggaagcttcttgaagacaaacaacgtctgtagcgaccctttgcaggcagcggaaccccccacctggcgacaggtgcccctgcggccaaaagccacgtgtataagatacacctgcaaaggcggcacaaccccagtgccacgttgtgagttggatagttgtggaaagagtcaaatggctctcctcaagcgtattcaacaaggggctgaaggatgcccagaaggtaccccattgtatgggatctgatctggggcctcggtgcacatgctttacatgtgtttagtcgaggttaaaaaaacgtctaggccccccgaaccacggggacgtggttttcctttgaaaaacacgataataccatggtgagcaagggcgaggaggataacatggccatcatcaaggagttcatgcgcttcaaggtgcacatggagggctccgtgaacggccacgagttcgagatcgagggcgagggcgagggccgcccctacgagggcacccagaccgccaagctgaaggtgaccaagggtggccccctgcccttcgcctgggacatcctgtcccctcagttcatgtacggctccaaggcctacgtgaagcaccccgccgacatccccgactacttgaagctgtccttccccgagggcttcaagtgggagcgcgtgatgaacttcgaggacggcggcgtggtgaccgtgacccaggactcctccctgcaggacggcgagttcatctacaaggtgaagctgcgcggcaccaacttcccctccgacggccccgtaatgcagaagaagaccatgggctgggaggcctcctccgagcggatgtaccccgaggacggcgccctgaagggcgagatcaagcagaggctgaagctgaaggacggcggccactacgacgctgaggtcaagaccacctacaaggccaagaagcccgtgcagctgcccggcgcctacaacgtcaacatcaagttggacatcacctcccacaacgaggactacaccatcgtggaacagtacgaacgcgccgagggccgccactccaccggcggcatggacgagctgtacaagtaacaccggtggcgcgttaagtcgacaatcaacctctggattacaaaatttgtgaaagattgactggtattcttaactatgttgctccttttacgctatgtggatacgctgctttaatgcctttgtatcatgctattgcttcccgtatggctttcattttctcctccttgtataaatcctggttgctgtctctttatgaggagttgtggcccgttgtcaggcaacgtggcgtggtgtgcactgtgtttgctgacgcaacccccactggttggggcattgccaccacctgtcagctcctttccgggactttcgctttccccctccctattgccacggcggaactcatcgccgcctgccttgcccgctgctggacaggggctcggctgttgggcactgacaattccgtggtgttgtcggggaaatcatcgtcctttccttggctgctcgcctgtgttgccacctggattctgcgcgggacgtccttctgctacgtcccttcggccctcaatccagcggaccttccttcccgcggcctgctgccggctctgcggcctcttccgcgtcttcgccttcgccctcagacgagtcggatctccctttgggccgcctccccgcgtcgactttaagaccaatgacttacaaggcagctgtagatcttagccactttttaaaagaaaaggggggactggaagggctaattcactcccaacgaagacaagatctgctttttgcttgtactgggtctctctggttagaccagatctgagcctgggagctctctggctaactagggaacccactgcttaagcctcaataaagcttgccttgagtgcttcaagtagtgtgtgcccgtctgttgtgtgactctggtaactagagatccctcagacccttttagtcagtgtggaaaatctctagcagtacgtatagtagttcatgtcatcttattattcagtatttataacttgcaaagaaatgaatatcagagagtgagaggaacttgtttattgcagcttataatggttacaaataaagcaatagcatcacaaatttcacaaataaagcatttttttcactgcattctagttgtggtttgtccaaactcatcaatgtatcttatcatgtctggctctagctatcccgcccctaactccgcccatcccgcccctaactccgcccagttccgcccattctccgccccatggctgactaattttttttatttatgcagaggccgaggccgcctcggcctctgagctattccagaagtagtgaggaggcttttttggaggcctagggacgtacccaattcgccctatagtgagtcgtattacgcgcgctcactggccgtcgttttacaacgtcgtgactgggaaaaccctggcgttacccaacttaatcgccttgcagcacatccccctttcgccagctggcgtaatagcgaagaggcccgcaccgatcgcccttcccaacagttgcgcagcctgaatggcgaatgggacgcgccctgtagcggcgcattaagcgcggcgggtgtggtggttacgcgcagcgtgaccgctacacttgccagcgccctagcgcccgctcctttcgctttcttcccttcctttctcgccacgttcgccggctttccccgtcaagctctaaatcgggggctccctttagggttccgatttagtgctttacggcacctcgaccccaaaaaacttgattagggtgatggttcacgtagtgggccatcgccctgatagacggtttttcgccctttgacgttggagtccacgttctttaatagtggactcttgttccaaactggaacaacactcaaccctatctcggtctattcttttgatttataagggattttgccgatttcggcctattggttaaaaaatgagctgatttaacaaaaatttaacgcgaattttaacaaaatattaacgcttacaatttaggtggcacttttcggggaaatgtgcgcggaacccctatttgtttatttttctaaatacattcaaatatgtatccgctcatgagacaataaccctgataaatgcttcaataatattgaaaaaggaagagtatgagtattcaacatttccgtgtcgcccttattcccttttttgcggcattttgccttcctgtttttgctcacccagaaacgctggtgaaagtaaaagatgctgaagatcagttgggtgcacgagtgggttacatcgaactggatctcaacagcggtaagatccttgagagttttcgccccgaagaacgttttccaatgatgagcacttttaaagttctgctatgtggcgcggtattatcccgtattgacgccgggcaagagcaactcggtcgccgcatacactattctcagaatgacttggttgagtactcaccagtcacagaaaagcatcttacggatggcatgacagtaagagaattatgcagtgctgccataaccatgagtgataacactgcggccaacttacttctgacaacgatcggaggaccgaaggagctaaccgcttttttgcacaacatgggggatcatgtaactcgccttgatcgttgggaaccggagctgaatgaagccataccaaacgacgagcgtgacaccacgatgcctgtagcaatggcaacaacgttgcgcaaactattaactggcgaactacttactctagcttcccggcaacaattaatagactggatggaggcggataaagttgcaggaccacttctgcgctcggcccttccggctggctggtttattgctgataaatctggagccggtgagcgtgggtctcgcggtatcattgcagcactggggccagatggtaagccctcccgtatcgtagttatctacacgacggggagtcaggcaactatggatgaacgaaatagacagatcgctgagataggtgcctcactgattaagcattggtaactgtcagaccaagtttactcatatatactttagattgatttaaaacttcatttttaatttaaaaggatctaggtgaagatcctttttgataatctcatgaccaaaatcccttaacgtgagttttcgttccactgagcgtcagaccccgtagaaaagatcaaaggatcttcttgagatcctttttttctgcgcgtaatctgctgcttgcaaacaaaaaaaccaccgctaccagcggtggtttgtttgccggatcaagagctaccaactctttttccgaaggtaactggcttcagcagagcgcagataccaaatactgttcttctagtgtagccgtagttaggccaccacttcaagaactctgtagcaccgcctacatacctcgctctgctaatcctgttaccagtggctgctgccagtggcgataagtcgtgtcttaccgggttggactcaagacgatagttaccggataaggcgcagcggtcgggctgaacggggggttcgtgcacacagcccagcttggagcgaacgacctacaccgaactgagatacctacagcgtgagctatgagaaagcgccacgcttcccgaagggagaaaggcggacaggtatccggtaagcggcagggtcggaacaggagagcgcacgagggagcttccagggggaaacgcctggtatctttatagtcctgtcgggtttcgccacctctgacttgagcgtcgatttttgtgatgctcgtcaggggggcggagcctatggaaaaacgccagcaacgcggcctttttacggttcctggccttttgctggccttttgctcacatgttctttcctgcgttatcccctgattctgtggataaccgtattaccgcctttgagtgagctgataccgctcgccgcagccgaacgaccgagcgcagcgagtcagtgagcgaggaagcggaagagcgcccaatacgcaaaccgcctctccccgcgcgttggccgattcattaatgcagctggcacgacaggtttcccgactggaaagcgggcagtgagcgcaacgcaattaatgtgagttagctcactcattaggcaccccaggctttacactttatgcttccggctcgtatgttgtgtggaattgtgagcggataacaatttcacacaggaaacagctatgaccatgattacgccaagcgcgcaattaaccctcactaaagggaacaaaagctggagctgcaagcttaatgtagtcttatgcaatactcttgtagtcttgcaacatggtaacgatgagttagcaacatgccttacaaggagagaaaaagcaccgtgcatgccgattggtggaagtaaggtggtacgatcgtgccttattaggaaggcaacagacgggtctgacatggattggacgaaccactgaattgccgcattgcagagatattgtatttaagtgcctagctcgatacataaacgggtctctctggttagaccagatctgagcctgggagctctctggctaactagggaacccactgcttaagcctcaataaagcttgccttgagtgcttcaagtagtgtgtgcccgtctgttgtgtgactctggtaactagagatccctcagacccttttagtcagtgtggaaaatctctagcagtggcgcccgaacagggacttgaaagcgaaagggaaaccagaggagctctctcgacgcaggactcggcttgctgaagcgcgcacggcaagaggcgaggggcggcgactggtgagtacgccaaaaattttgactagcggaggctagaaggagagagatgggtgcgagagcgtcagtattaagcgggggagaattagatcgcgatgggaaaaaattcggttaaggccagggggaaagaaaaaatataaattaaaacatatagtatgggcaagcagggagctagaacgattcgcagttaatcctggcctgttagaaacatcagaaggctgtagacaaatactgggacagctacaaccatcccttcagacaggatcagaagaacttagatcattatataatacagtagcaaccctctattgtgtgcatcaaaggatagagataaaagacaccaaggaagctttagacaagatagaggaagagcaaaacaaaagtaagaccaccgcacagcaagcggccgctgatcttcagacctggaggaggagatatgagggacaattggagaagtgaattatataaatataaagtagtaaaaattgaaccattaggagtagcacccaccaaggcaaagagaagagtggtgcagagagaaaaaagagcagtgggaataggagctttgttccttgggttcttgggagcagcaggaagcactatgggcgcagcgtcaatgacgctgacggtacaggccagacaattattgtctggtatagtgcagcagcagaacaatttgctgagggctattgaggcgcaacagcatctgttgcaactcacagtctggggcatcaagcagctccaggcaagaatcctggctgtggaaagatacctaaaggatcaacagctcctggggatttggggttgctctggaaaactcatttgcaccactgctgtgccttggaatgctagttggagtaataaatctctggaacagatttggaatcacacgacctggatggagtgggacagagaaattaacaattacacaagcttaatacactccttaattgaagaatcgcaaaaccagcaagaaaagaatgaacaagaattattggaattagataaatgggcaagtttgtggaattggtttaacataacaaattggctgtggtatataaaattattcataatgatagtaggaggcttggtaggtttaagaatagtttttgctgtactttctatagtgaatagagttaggcagggatattcaccattatcgtttcagacccacctcccaaccccgaggggacccttgcgccttttccaaggcagccctgggtttgcgcagggacgcggctgctctgggcgtggttccgggaaacgcagcggcgccgaccctgggtctcgcacattcttcacgtccgttcgcagcgtcacccggatcttcgccgctacccttgtgggccccccggcgacgcttcctgctccgcccctaagtcgggaaggttccttgcggttcgcggcgtgccggacgtgacaaacggaagccgcacgtctcactagtaccctcgcagacggacagcgccagggagcaatggcagcgcgccgaccgcgatgggctgtggccaatagcggctgctcagcagggcgcgccgagagcagcggccgggaaggggcggtgcgggaggcggggtgtggggcggtagtgtgggccctgttcctgcccgcgcggtgttccgcattctgcaagcctccggagcgcacgtcggcagtcggctccctcgttgaccgaatcaccgacctctctccccagggggtacccagctgtctagagaattctagatcttgagacaaatggcagtattcatccacaattttaaaagaaaaggggggattggggggtacagtgcaggggaaagaatagtagacataatagcaacagacatacaaactaaagaattacaaaaacaaattacaaaaattcaaaattttcgggtttattacagggacagcagagatccactttggcgccggctcgaggggg

SEQ ID NO: 177 - protein, 190 aa, Artificial Sequence
  Synthetic Polypeptide
MSPEIEKLSQSDIYWDSIVSITETGVEEVFDLTVPGPHNFVANDIIVHNSNNVLTDNGRITAVIDWSEAMFGDSQYEVANIFFWRPWLACMEQQTRYFERRHPELAGSPRLRAYMLRIGLDQLYQSLVDGNFDDAAWAQGRCDAIVRSGAGTVGRTQIARRSAAVWTDGCVEVLADSGNRRPSTRPRAKE

SEQ ID NO: 178 - DNA, 9420 bp, Artificial Sequence
  Synthetic Polynucleotide
cccggggttattaatagtaatcaattacggggtcattagttcatagcccatatatggagttccgcgttacataacttacggtaaatggcccgcctggctgaccgcccaacgacccccgcccattgacgtcaataatgacgtatgttcccatagtaacgccaatagggactttccattgacgtcaatgggtggagtatttacggtaaactgcccacttggcagtacatcaagtgtatcatatgccaagtacgccccctattgacgtcaatgacggtaaatggcccgcctggcattatgcccagtacatgaccttatgggactttcctacttggcagtacatctacgtattagtcatcgctattaccatggtgatgcggttttggcagtacatcaatgggcgtggatagcggtttgactcacggggatttccaagtctccaccccattgacgtcaatgggagtttgttttggcaccaaaatcaacgggactttccaaaatgtcgtaacaactccgccccattgacgcaaatgggcggtaggcgtgtacggtgggaggtctatataagcagagctctctggctaactgtcgggatcaacaagtttgtacaaaaaagcaggctccgaattcaccggtgccgccaccatgattaagatcgctacgcggaagtacctggggaaacagaacgtctacgacataggtgtggagcgcgatcacaactttgctctgaaaaatggatttatcgccagcaactgcatctcccgccgtgcacagggtgtcacgttgcaagacctgcctgaaaccgaactgcccgctgttctgcagccggtcgcggaggccatggatgcgatcgctgcggccgatcttagccagacgagcgggttcggcccattcggaccgcaaggaatcggtcaatacactacatggcgtgatttcatatgcgcgattgctgatccccatgtgtatcactggcaaactgtgatggacgacaccgtcagtgcgtccgtcgcgcaggctctcgatgagctgatgctttgggccgaggactgccccgaagtccggcacctcgtgcacgcggatttcggctgtatcagtggcgactccctgatctcactcgcaagcactggaaagcgagttagcatcaaggacttgctggacgaaaaggatttcgaaatttgggcaatcaatgagcagaccatgaaactggagtctgcaaaggtgtcccgggtgttttgcacgggtaagaagcttgtttatatccttaaaactagactgggccggacgatcaaagccaccgcgaaccacagattcttgacaatcgacgggtggaaacggctggacgaactgagcttgaaggagcacatcgcccttcctcggaagctcgagtcatcttccctgcagctgtgattaattaagaattcgacccagctttcttgtacaaagtggttggtaagcctatccctaaccctctcctcggtctcgattctacgtagtaatgagctagcagtctcgaggttaacgaattccgccccccccctaacgttactggccgaagccgcttggaataaggccggtgtgcgcttgtctatatgttattttccaccatattgccgtcttttggcaatgtgagggcccggaaacctggccctgtcttcttgacgagcattcctaggggtctttcccctctcgccaaaggaatgcaaggtctgttgaatgtcgtgaaggaagcagttcctctggaagcttcttgaagacaaacaacgtctgtagcgaccctttgcaggcagcggaaccccccacctggcgacaggtgcccctgcggccaaaagccacgtgtataagatacacctgcaaaggcggcacaaccccagtgccacgttgtgagttggatagttgtggaaagagtcaaatggctctcctcaagcgtattcaacaaggggctgaaggatgcccagaaggtaccccattgtatgggatctgatctggggcctcggtgcacatgctttacatgtgtttagtcgaggttaaaaaaacgtctaggccccccgaaccacggggacgtggttttcctttgaaaaacacgataataccatggtgagcaagggcgaggagctgttcaccggggtggtgcccatcctggtcgagctggacggcgacgtaaacggccacaagttcagcgtgtccggcgagggcgagggcgatgccacctacggcaagctgaccctgaagttcatctgcaccaccggcaagctgcccgtgccctggcccaccctcgtgaccaccctgacctacggcgtgcagtgcttcagccgctaccccgaccacatgaagcagcacgacttcttcaagtccgccatgcccgaaggctacgtccaggagcgcaccatcttcttcaaggacgacggcaactacaagacccgcgccgaggtgaagttcgagggcgacaccctggtgaaccgcatcgagctgaagggcatcgacttcaaggaggacggcaacatcctggggcacaagctggagtacaactacaacagccacaacgtctatatcatggccgacaagcagaagaacggcatcaaggtgaacttcaagatccgccacaacatcgaggacggcagcgtgcagctcgccgaccactaccagcagaacacccccatcggcgacggccccgtgctgctgcccgacaaccactacctgagcacccagtccgccctgagcaaagaccccaacgagaagcgcgatcacatggtcctgctggagttcgtgaccgccgccgggatcactctcggcatggacgagctgtacaagtaacaccggtggcgcgttaagtcgacaatcaacctctggattacaaaatttgtgaaagattgactggtattcttaactatgttgctccttttacgctatgtggatacgctgctttaatgcctttgtatcatgctattgcttcccgtatggctttcattttctcctccttgtataaatcctggttgctgtctctttatgaggagttgtggcccgttgtcaggcaacgtggcgtggtgtgcactgtgtttgctgacgcaacccccactggttggggcattgccaccacctgtcagctcctttccgggactttcgctttccccctccctattgccacggcggaactcatcgccgcctgccttgcccgctgctggacaggggctcggctgttgggcactgacaattccgtggtgttgtcggggaaatcatcgtcctttccttggctgctcgcctgtgttgccacctggattctgcgcgggacgtccttctgctacgtcccttcggccctcaatccagcggaccttccttcccgcggcctgctgccggctctgcggcctcttccgcgtcttcgccttcgccctcagacgagtcggatctccctttgggccgcctccccgcgtcgactttaagaccaatgacttacaaggcagctgtagatcttagccactttttaaaagaaaaggggggactggaagggctaattcactcccaacgaagacaagatctgctttttgcttgtactgggtctctctggttagaccagatctgagcctgggagctctctggctaactagggaacccactgcttaagcctcaataaagcttgccttgagtgcttcaagtagtgtgtgcccgtctgttgtgtgactctggtaactagagatccctcagacccttttagtcagtgtggaaaatctctagcagtacgtatagtagttcatgtcatcttattattcagtatttataacttgcaaagaaatgaatatcagagagtgagaggaacttgtttattgcagcttataatggttacaaataaagcaatagcatcacaaatttcacaaataaagcatttttttcactgcattctagttgtggtttgtccaaactcatcaatgtatcttatcatgtctggctctagctatcccgcccctaactccgcccatcccgcccctaactccgcccagttccgcccattctccgccccatggctgactaattttttttatttatgcagaggccgaggccgcctcggcctctgagctattccagaagtagtgaggaggcttttttggaggcctagggacgtacccaattcgccctatagtgagtcgtattacgcgcgctcactggccgtcgttttacaacgtcgtgactgggaaaaccctggcgttacccaacttaatcgccttgcagcacatccccctttcgccagctggcgtaatagcgaagaggcccgcaccgatcgcccttcccaacagttgcgcagcctgaatggcgaatgggacgcgccctgtagcggcgcattaagcgcggcgggtgtggtggttacgcgcagcgtgaccgctacacttgccagcgccctagcgcccgctcctttcgctttcttcccttcctttctcgccacgttcgccggctttccccgtcaagctctaaatcgggggctccctttagggttccgatttagtgctttacggcacctcgaccccaaaaaacttgattagggtgatggttcacgtagtgggccatcgccctgatagacggtttttcgccctttgacgttggagtccacgttctttaatagtggactcttgttccaaactggaacaacactcaaccctatctcggtctattcttttgatttataagggattttgccgatttcggcctattggttaaaaaatgagctgatttaacaaaaatttaacgcgaattttaacaaaatattaacgcttacaatttaggtggcacttttcggggaaatgtgcgcggaacccctatttgtttatttttctaaatacattcaaatatgtatccgctcatgagacaataaccctgataaatgcttcaataatattgaaaaaggaagagtatgagtattcaacatttccgtgtcgcccttattcccttttttgcggcattttgccttcctgtttttgctcacccagaaacgctggtgaaagtaaaagatgctgaagatcagttgggtgcacgagtgggttacatcgaactggatctcaacagcggtaagatccttgagagttttcgccccgaagaacgttttccaatgatgagcacttttaaagttctgctatgtggcgcggtattatcccgtattgacgccgggcaagagcaactcggtcgccgcatacactattctcagaatgacttggttgagtactcaccagtcacagaaaagcatcttacggatggcatgacagtaagagaattatgcagtgctgccataaccatgagtgataacactgcggccaacttacttctgacaacgatcggaggaccgaaggagctaaccgcttttttgcacaacatgggggatcatgtaactcgccttgatcgttgggaaccggagctgaatgaagccataccaaacgacgagcgtgacaccacgatgcctgtagcaatggcaacaacgttgcgcaaactattaactggcgaactacttactctagcttcccggcaacaattaatagactggatggaggcggataaagttgcaggaccacttctgcgctcggcccttccggctggctggtttattgctgataaatctggagccggtgagcgtgggtctcgcggtatcattgcagcactggggccagatggtaagccctcccgtatcgtagttatctacacgacggggagtcaggcaactatggatgaacgaaatagacagatcgctgagataggtgcctcactgattaagcattggtaactgtcagaccaagtttactcatatatactttagattgatttaaaacttcatttttaatttaaaaggatctaggtgaagatcctttttgataatctcatgaccaaaatcccttaacgtgagttttcgttccactgagcgtcagaccccgtagaaaagatcaaaggatcttcttgagatcctttttttctgcgcgtaatctgctgcttgcaaacaaaaaaaccaccgctaccagcggtggtttgtttgccggatcaagagctaccaactctttttccgaaggtaactggcttcagcagagcgcagataccaaatactgttcttctagtgtagccgtagttaggccaccacttcaagaactctgtagcaccgcctacatacctcgctctgctaatcctgttaccagtggctgctgccagtggcgataagtcgtgtcttaccgggttggactcaagacgatagttaccggataaggcgcagcggtcgggctgaacggggggttcgtgcacacagcccagcttggagcgaacgacctacaccgaactgagatacctacagcgtgagctatgagaaagcgccacgcttcccgaagggagaaaggcggacaggtatccggtaagcggcagggtcggaacaggagagcgcacgagggagcttccagggggaaacgcctggtatctttatagtcctgtcgggtttcgccacctctgacttgagcgtcgatttttgtgatgctcgtcaggggggcggagcctatggaaaaacgccagcaacgcggcctttttacggttcctggccttttgctggccttttgctcacatgttctttcctgcgttatcccctgattctgtggataaccgtattaccgcctttgagtgagctgataccgctcgccgcagccgaacgaccgagcgcagcgagtcagtgagcgaggaagcggaagagcgcccaatacgcaaaccgcctctccccgcgcgttggccgattcattaatgcagctggcacgacaggtttcccgactggaaagcgggcagtgagcgcaacgcaattaatgtgagttagctcactcattaggcaccccaggctttacactttatgcttccggctcgtatgttgtgtggaattgtgagcggataacaatttcacacaggaaacagctatgaccatgattacgccaagcgcgcaattaaccctcactaaagggaacaaaagctggagctgcaagcttaatgtagtcttatgcaatactcttgtagtcttgcaacatggtaacgatgagttagcaacatgccttacaaggagagaaaaagcaccgtgcatgccgattggtggaagtaaggtggtacgatcgtgccttattaggaaggcaacagacgggtctgacatggattggacgaaccactgaattgccgcattgcagagatattgtatttaagtgcctagctcgatacataaacgggtctctctggttagaccagatctgagcctgggagctctctggctaactagggaacccactgcttaagcctcaataaagcttgccttgagtgcttcaagtagtgtgtgcccgtctgttgtgtgactctggtaactagagatccctcagacccttttagtcagtgtggaaaatctctagcagtggcgcccgaacagggacttgaaagcgaaagggaaaccagaggagctctctcgacgcaggactcggcttgctgaagcgcgcacggcaagaggcgaggggcggcgactggtgagtacgccaaaaattttgactagcggaggctagaaggagagagatgggtgcgagagcgtcagtattaagcgggggagaattagatcgcgatgggaaaaaattcggttaaggccagggggaaagaaaaaatataaattaaaacatatagtatgggcaagcagggagctagaacgattcgcagttaatcctggcctgttagaaacatcagaaggctgtagacaaatactgggacagctacaaccatcccttcagacaggatcagaagaacttagatcattatataatacagtagcaaccctctattgtgtgcatcaaaggatagagataaaagacaccaaggaagctttagacaagatagaggaagagcaaaacaaaagtaagaccaccgcacagcaagcggccgctgatcttcagacctggaggaggagatatgagggacaattggagaagtgaattatataaatataaagtagtaaaaattgaaccattaggagtagcacccaccaaggcaaagagaagagtggtgcagagagaaaaaagagcagtgggaataggagctttgttccttgggttcttgggagcagcaggaagcactatgggcgcagcgtcaatgacgctgacggtacaggccagacaattattgtctggtatagtgcagcagcagaacaatttgctgagggctattgaggcgcaacagcatctgttgcaactcacagtctggggcatcaagcagctccaggcaagaatcctggctgtggaaagatacctaaaggatcaacagctcctggggatttggggttgctctggaaaactcatttgcaccactgctgtgccttggaatgctagttggagtaataaatctctggaacagatttggaatcacacgacctggatggagtgggacagagaaattaacaattacacaagcttaatacactccttaattgaagaatcgcaaaaccagcaagaaaagaatgaacaagaattattggaattagataaatgggcaagtttgtggaattggtttaacataacaaattggctgtggtatataaaattattcataatgatagtaggaggcttggtaggtttaagaatagtttttgctgtactttctatagtgaatagagttaggcagggatattcaccattatcgtttcagacccacctcccaaccccgaggggacccttgcgccttttccaaggcagccctgggtttgcgcagggacgcggctgctctgggcgtggttccgggaaacgcagcggcgccgaccctgggtctcgcacattcttcacgtccgttcgcagcgtcacccggatcttcgccgctacccttgtgggccccccggcgacgcttcctgctccgcccctaagtcgggaaggttccttgcggttcgcggcgtgccggacgtgacaaacggaagccgcacgtctcactagtaccctcgcagacggacagcgccagggagcaatggcagcgcgccgaccgcgatgggctgtggccaatagcggctgctcagcagggcgcgccgagagcagcggccgggaaggggcggtgcgggaggcggggtgtggggcggtagtgtgggccctgttcctgcccgcgcggtgttccgcattctgcaagcctccggagcgcacgtcggcagtcggctccctcgttgaccgaatcaccgacctctctccccagggggtacccagctgtctagagaattctagatcttgagacaaatggcagtattcatccacaattttaaaagaaaaggggggattggggggtacagtgcaggggaaagaatagtagacataatagcaacagacatacaaactaaagaattacaaaaacaaattacaaaaattcaaaattttcgggtttattacagggacagcagagatccactttggcgccggctcgaggggg

SEQ ID NO: 179 - protein, 253 aa, Artificial Sequence
  Synthetic Polypeptide
MIKIATRKYLGKQNVYDIGVERDHNFALKNGFIASNCISRRAQGVTLQDLPETELPAVLQPVAEAMDAIAAADLSQTSGFGPFGPQGIGQYTTWRDFICAIADPHVYHWQTVMDDTVSASVAQALDELMLWAEDCPEVRHLVHADFGCISGDSLISLASTGKRVSIKDLLDEKDFEIWAINEQTMKLESAKVSRVFCTGKKLVYILKTRLGRTIKATANHRFLTIDGWKRLDELSLKEHIALPRKLESSSLQL

SEQ ID NO: 180 - DNA, 9564 bp, Artificial Sequence
  Synthetic Polynucleotide
cccggggttattaatagtaatcaattacggggtcattagttcatagcccatatatggagttccgcgttacataacttacggtaaatggcccgcctggctgaccgcccaacgacccccgcccattgacgtcaataatgacgtatgttcccatagtaacgccaatagggactttccattgacgtcaatgggtggagtatttacggtaaactgcccacttggcagtacatcaagtgtatcatatgccaagtacgccccctattgacgtcaatgacggtaaatggcccgcctggcattatgcccagtacatgaccttatgggactttcctacttggcagtacatctacgtattagtcatcgctattaccatggtgatgcggttttggcagtacatcaatgggcgtggatagcggtttgactcacggggatttccaagtctccaccccattgacgtcaatgggagtttgttttggcaccaaaatcaacgggactttccaaaatgtcgtaacaactccgccccattgacgcaaatgggcggtaggcgtgtacggtgggaggtctatataagcagagctctctggctaactgtcgggatcaacaagtttgtacaaaaaagcaggctccgaattcaccggtgccaccatgaaaaagcctgaactcaccgcgacgtctgtcgagaagtttctgatcgaaaagttcgacagcgtctccgacctgatgcagctctcggagggcgaagaatctcgtgctttcagcttcgatgtaggagggcgtggatatgtcctgcgggtaaatagctgcgccgatggtttctacaaagatcgttatgtttatcggcactttgcatcggccgcgctcccgattccggaagtgcttgacattggggaatttagcgagagcctgacctattgcatctcccgccgtgcacagggtgtcacgttgcaagacctgcctgaaaccgaactgcccgctgttctgcagccggtcgcggaggccatggatgcgatcgctgcggccgatcttagccagacgagcgggttcggcccattcggaccgcaaggaatcggtcaatacactacatggcgtgatttcatatgcgcgattgctgatccccatgtgtatcactggcaaactgtgatggacgacaccgtcagtgcgtccgtcgcgcaggctctcgatgagctgatgctttgggccgaggactgccccgaagtccggcacctcgtgcacgcggatttcggctgtatcagtggcgactccctgatctcactcgcaagcactggaaagcgagttagcatcaaggacttgctggacgaaaaggatttcgaaatttgggcaatcaatgagcagaccatgaaactggagtctgcaaaggtgtcccgggtgttttgcacgggtaagaagcttgtttatatccttaaaactagactgggccggacgatcaaagccaccgcgaaccacagattcttgacaatcgacgggtggaaacggctggacgaactgagcttgaaggagcacatcgcccttcctcggaagctcgagtcatcttccctgcagctgtgattaattaagaattcgacccagctttcttgtacaaagtggttggtaagcctatccctaaccctctcctcggtctcgattctacgtagtaatgagctagcagtctcgaggttaacgaattccgccccccccctaacgttactggccgaagccgcttggaataaggccggtgtgcgcttgtctatatgttattttccaccatattgccgtcttttggcaatgtgagggcccggaaacctggccctgtcttcttgacgagcattcctaggggtctttcccctctcgccaaaggaatgcaaggtctgttgaatgtcgtgaaggaagcagttcctctggaagcttcttgaagacaaacaacgtctgtagcgaccctttgcaggcagcggaaccccccacctggcgacaggtgcccctgcggccaaaagccacgtgtataagatacacctgcaaaggcggcacaaccccagtgccacgttgtgagttggatagttgtggaaagagtcaaatggctctcctcaagcgtattcaacaaggggctgaaggatgcccagaaggtaccccattgtatgggatctgatctggggcctcggtgcacatgctttacatgtgtttagtcgaggttaaaaaaacgtctaggccccccgaaccacggggacgtggttttcctttgaaaaacacgataataccatggccatgagcgagctgattaaggagaacatgcacatgaagctgtacatggagggcaccgtggacaaccatcacttcaagtgcacatccgagggcgaaggcaagccctacgagggcacccagaccatgagaatcaaggtggtcgagggcggccctctccccttcgccttcgacatcctggctactagcttcctctacggcagcaagaccttcatcaaccacacccagggcatccccgacttcttcaagcagtccttccctgagggcttcacatgggagagagtcaccacatacgaagacgggggcgtgctgaccgctacccaggacaccagcctccaggacggctgcctcatctacaacgtcaagatcagaggggtgaacttcacatccaacggccctgtgatgcagaagaaaacactcggctgggaggccttcaccgagacgctgtaccccgctgacggcggcctggaaggcagaaacgacatggccctgaagctcgtgggcgggagccatctgatcgcaaacatcaagaccacatatagatccaagaaacccgctaagaacctcaagatgcctggcgtctactatgtggactacagactggaaagaatcaaggaggccaacaacgagacctacgtcgagcagcacgaggtggcagtggccagatactgcgacctccctagcaaactggggcacaagcttaattaacaccggtggcgcgttaagtcgacaatcaacctctggattacaaaatttgtgaaagattgactggtattcttaactatgttgctccttttacgctatgtggatacgctgctttaatgcctttgtatcatgctattgcttcccgtatggctttcattttctcctccttgtataaatcctggttgctgtctctttatgaggagttgtggcccgttgtcaggcaacgtggcgtggtgtgcactgtgtttgctgacgcaacccccactggttggggcattgccaccacctgtcagctcctttccgggactttcgctttccccctccctattgccacggcggaactcatcgccgcctgccttgcccgctgctggacaggggctcggctgttgggcactgacaattccgtggtgttgtcggggaaatcatcgtcctttccttggctgctcgcctgtgttgccacctggattctgcgcgggacgtccttctgctacgtcccttcggccctcaatccagcggaccttccttcccgcggcctgctgccggctctgcggcctcttccgcgtcttcgccttcgccctcagacgagtcggatctccctttgggccgcctccccgcgtcgactttaagaccaatgacttacaaggcagctgtagatcttagccactttttaaaagaaaaggggggactggaagggctaattcactcccaacgaagacaagatctgctttttgcttgtactgggtctctctggttagaccagatctgagcctgggagctctctggctaactagggaacccactgcttaagcctcaataaagcttgccttgagtgcttcaagtagtgtgtgcccgtctgttgtgtgactctggtaactagagatccctcagacccttttagtcagtgtggaaaatctctagcagtacgtatagtagttcatgtcatcttattattcagtatttataacttgcaaagaaatgaatatcagagagtgagaggaacttgtttattgcagcttataatggttacaaataaagcaatagcatcacaaatttcacaaataaagcatttttttcactgcattctagttgtggtttgtccaaactcatcaatgtatcttatcatgtctggctctagctatcccgcccctaactccgcccatcccgcccctaactccgcccagttccgcccattctccgccccatggctgactaattttttttatttatgcagaggccgaggccgcctcggcctctgagctattccagaagtagtgaggaggcttttttggaggcctagggacgtacccaattcgccctatagtgagtcgtattacgcgcgctcactggccgtcgttttacaacgtcgtgactgggaaaaccctggcgttacccaacttaatcgccttgcagcacatccccctttcgccagctggcgtaatagcgaagaggcccgcaccgatcgcccttcccaacagttgcgcagcctgaatggcgaatgggacgcgccctgtagcggcgcattaagcgcggcgggtgtggtggttacgcgcagcgtgaccgctacacttgccagcgccctagcgcccgctcctttcgctttcttcccttcctttctcgccacgttcgccggctttccccgtcaagctctaaatcgggggctccctttagggttccgatttagtgctttacggcacctcgaccccaaaaaacttgattagggtgatggttcacgtagtgggccatcgccctgatagacggtttttcgccctttgacgttggagtccacgttctttaatagtggactcttgttccaaactggaacaacactcaaccctatctcggtctattcttttgatttataagggattttgccgatttcggcctattggttaaaaaatgagctgatttaacaaaaatttaacgcgaattttaacaaaatattaacgcttacaatttaggtggcacttttcggggaaatgtgcgcggaacccctatttgtttatttttctaaatacattcaaatatgtatccgctcatgagacaataaccctgataaatgcttcaataatattgaaaaaggaagagtatgagtattcaacatttccgtgtcgcccttattcccttttttgcggcattttgccttcctgtttttgctcacccagaaacgctggtgaaagtaaaagatgctgaagatcagttgggtgcacgagtgggttacatcgaactggatctcaacagcggtaagatccttgagagttttcgccccgaagaacgttttccaatgatgagcacttttaaagttctgctatgtggcgcggtattatcccgtattgacgccgggcaagagcaactcggtcgccgcatacactattctcagaatgacttggttgagtactcaccagtcacagaaaagcatcttacggatggcatgacagtaagagaattatgcagtgctgccataaccatgagtgataacactgcggccaacttacttctgacaacgatcggaggaccgaaggagctaaccgcttttttgcacaacatgggggatcatgtaactcgccttgatcgttgggaaccggagctgaatgaagccataccaaacgacgagcgtgacaccacgatgcctgtagcaatggcaacaacgttgcgcaaactattaactggcgaactacttactctagcttcccggcaacaattaatagactggatggaggcggataaagttgcaggaccacttctgcgctcggcccttccggctggctggtttattgctgataaatctggagccggtgagcgtgggtctcgcggtatcattgcagcactggggccagatggtaagccctcccgtatcgtagttatctacacgacggggagtcaggcaactatggatgaacgaaatagacagatcgctgagataggtgcctcactgattaagcattggtaactgtcagaccaagtttactcatatatactttagattgatttaaaacttcatttttaatttaaaaggatctaggtgaagatcctttttgataatctcatgaccaaaatcccttaacgtgagttttcgttccactgagcgtcagaccccgtagaaaagatcaaaggatcttcttgagatcctttttttctgcgcgtaatctgctgcttgcaaacaaaaaaaccaccgctaccagcggtggtttgtttgccggatcaagagctaccaactctttttccgaaggtaactggcttcagcagagcgcagataccaaatactgttcttctagtgtagccgtagttaggccaccacttcaagaactctgtagcaccgcctacatacctcgctctgctaatcctgttaccagtggctgctgccagtggcgataagtcgtgtcttaccgggttggactcaagacgatagttaccggataaggcgcagcggtcgggctgaacggggggttcgtgcacacagcccagcttggagcgaacgacctacaccgaactgagatacctacagcgtgagctatgagaaagcgccacgcttcccgaagggagaaaggcggacaggtatccggtaagcggcagggtcggaacaggagagcgcacgagggagcttccagggggaaacgcctggtatctttatagtcctgtcgggtttcgccacctctgacttgagcgtcgatttttgtgatgctcgtcaggggggcggagcctatggaaaaacgccagcaacgcggcctttttacggttcctggccttttgctggccttttgctcacatgttctttcctgcgttatcccctgattctgtggataaccgtattaccgcctttgagtgagctgataccgctcgccgcagccgaacgaccgagcgcagcgagtcagtgagcgaggaagcggaagagcgcccaatacgcaaaccgcctctccccgcgcgttggccgattcattaatgcagctggcacgacaggtttcccgactggaaagcgggcagtgagcgcaacgcaattaatgtgagttagctcactcattaggcaccccaggctttacactttatgcttccggctcgtatgttgtgtggaattgtgagcggataacaatttcacacaggaaacagctatgaccatgattacgccaagcgcgcaattaaccctcactaaagggaacaaaagctggagctgcaagcttaatgtagtcttatgcaatactcttgtagtcttgcaacatggtaacgatgagttagcaacatgccttacaaggagagaaaaagcaccgtgcatgccgattggtggaagtaaggtggtacgatcgtgccttattaggaaggcaacagacgggtctgacatggattggacgaaccactgaattgccgcattgcagagatattgtatttaagtgcctagctcgatacataaacgggtctctctggttagaccagatctgagcctgggagctctctggctaactagggaacccactgcttaagcctcaataaagcttgccttgagtgcttcaagtagtgtgtgcccgtctgttgtgtgactctggtaactagagatccctcagacccttttagtcagtgtggaaaatctctagcagtggcgcccgaacagggacttgaaagcgaaagggaaaccagaggagctctctcgacgcaggactcggcttgctgaagcgcgcacggcaagaggcgaggggcggcgactggtgagtacgccaaaaattttgactagcggaggctagaaggagagagatgggtgcgagagcgtcagtattaagcgggggagaattagatcgcgatgggaaaaaattcggttaaggccagggggaaagaaaaaatataaattaaaacatatagtatgggcaagcagggagctagaacgattcgcagttaatcctggcctgttagaaacatcagaaggctgtagacaaatactgggacagctacaaccatcccttcagacaggatcagaagaacttagatcattatataatacagtagcaaccctctattgtgtgcatcaaaggatagagataaaagacaccaaggaagctttagacaagatagaggaagagcaaaacaaaagtaagaccaccgcacagcaagcggccgctgatcttcagacctggaggaggagatatgagggacaattggagaagtgaattatataaatataaagtagtaaaaattgaaccattaggagtagcacccaccaaggcaaagagaagagtggtgcagagagaaaaaagagcagtgggaataggagctttgttccttgggttcttgggagcagcaggaagcactatgggcgcagcgtcaatgacgctgacggtacaggccagacaattattgtctggtatagtgcagcagcagaacaatttgctgagggctattgaggcgcaacagcatctgttgcaactcacagtctggggcatcaagcagctccaggcaagaatcctggctgtggaaagatacctaaaggatcaacagctcctggggatttggggttgctctggaaaactcatttgcaccactgctgtgccttggaatgctagttggagtaataaatctctggaacagatttggaatcacacgacctggatggagtgggacagagaaattaacaattacacaagcttaatacactccttaattgaagaatcgcaaaaccagcaagaaaagaatgaacaagaattattggaattagataaatgggcaagtttgtggaattggtttaacataacaaattggctgtggtatataaaattattcataatgatagtaggaggcttggtaggtttaagaatagtttttgctgtactttctatagtgaatagagttaggcagggatattcaccattatcgtttcagacccacctcccaaccccgaggggacccttgcgccttttccaaggcagccctgggtttgcgcagggacgcggctgctctgggcgtggttccgggaaacgcagcggcgccgaccctgggtctcgcacattcttcacgtccgttcgcagcgtcacccggatcttcgccgctacccttgtgggccccccggcgacgcttcctgctccgcccctaagtcgggaaggttccttgcggttcgcggcgtgccggacgtgacaaacggaagccgcacgtctcactagtaccctcgcagacggacagcgccagggagcaatggcagcgcgccgaccgcgatgggctgtggccaatagcggctgctcagcagggcgcgccgagagcagcggccgggaaggggcggtgcgggaggcggggtgtggggcggtagtgtgggccctgttcctgcccgcgcggtgttccgcattctgcaagcctccggagcgcacgtcggcagtcggctccctcgttgaccgaatcaccgacctctctccccagggggtacccagctgtctagagaattctagatcttgagacaaatggcagtattcatccacaattttaaaagaaaaggggggattggggggtacagtgcaggggaaagaatagtagacataatagcaacagacatacaaactaaagaattacaaaaacaaattacaaaaattcaaaattttcgggtttattacagggacagcagagatccactttggcgccggctcgaggggg

SEQ ID NO: 181 - protein, 306 aa, Artificial Sequence
  Synthetic Polypeptide
MKKPELTATSVEKFLIEKFDSVSDLMQLSEGEESRAFSFDVGGRGYVLRVNSCADGFYKDRYVYRHFASAALPIPEVLDIGEFSESLTYCISRRAQGVTLQDLPETELPAVLQPVAEAMDAIAAADLSQTSGFGPFGPQGIGQYTTWRDFICAIADPHVYHWQTVMDDTVSASVAQALDELMLWAEDCPEVRHLVHADFGCISGDSLISLASTGKRVSIKDLLDEKDFEIWAINEQTMKLESAKVSRVFCTGKKLVYILKTRLGRTIKATANHRFLTIDGWKRLDELSLKEHIALPRKLESSSLQL

SEQ ID NO: 182 - DNA, 9234 bp, Artificial Sequence
  Synthetic Polynucleotide
cccggggttattaatagtaatcaattacggggtcattagttcatagcccatatatggagttccgcgttacataacttacggtaaatggcccgcctggctgaccgcccaacgacccccgcccattgacgtcaataatgacgtatgttcccatagtaacgccaatagggactttccattgacgtcaatgggtggagtatttacggtaaactgcccacttggcagtacatcaagtgtatcatatgccaagtacgccccctattgacgtcaatgacggtaaatggcccgcctggcattatgcccagtacatgaccttatgggactttcctacttggcagtacatctacgtattagtcatcgctattaccatggtgatgcggttttggcagtacatcaatgggcgtggatagcggtttgactcacggggatttccaagtctccaccccattgacgtcaatgggagtttgttttggcaccaaaatcaacgggactttccaaaatgtcgtaacaactccgccccattgacgcaaatgggcggtaggcgtgtacggtgggaggtctatataagcagagctctctggctaactgtcgggatcaacaagtttgtacaaaaaagcaggctccgaattcaccggtgccgccaccatgagtcccgaaatcgaaaagctctctcagagcgatatatattgggactccatcgtaagcataacagagacgggggtcgaggaggtgttcgatctgacagttcctgggcctcataatttcgtagcgaacgacatcattgtacataactccaacaatgtcctgacggacaatggccgcataacagcggtcattgactggagcgaggcgatgttcggggattcccaatacgaggtcgccaacatcttcttctggaggccgtggttggcttgcctttcatacgagaccgagatcctgactgtcgagtacggattgcttcctatcggcaaaatcgtggagaagaggattgaatgtaccgtctattcagtcgataataatgggaacatctacacacagcccgtggctcaatggcacgacagaggagagcaggaagtttttgaatactgtctcgaggacggatccctcatccgcgctactaaagatcataagtttatgaccgtggacggccagatgctgccaattgacgaaatttttgaacgagagctggatctgatgagagtcgacaaccttccaaactgattaattaagaattcgacccagctttcttgtacaaagtggttggtaagcctatccctaaccctctcctcggtctcgattctacgtagtaatgagctagcagtctcgaggttaacgaattccgccccccccctaacgttactggccgaagccgcttggaataaggccggtgtgcgcttgtctatatgttattttccaccatattgccgtcttttggcaatgtgagggcccggaaacctggccctgtcttcttgacgagcattcctaggggtctttcccctctcgccaaaggaatgcaaggtctgttgaatgtcgtgaaggaagcagttcctctggaagcttcttgaagacaaacaacgtctgtagcgaccctttgcaggcagcggaaccccccacctggcgacaggtgcccctgcggccaaaagccacgtgtataagatacacctgcaaaggcggcacaaccccagtgccacgttgtgagttggatagttgtggaaagagtcaaatggctctcctcaagcgtattcaacaaggggctgaaggatgcccagaaggtaccccattgtatgggatctgatctggggcctcggtgcacatgctttacatgtgtttagtcgaggttaaaaaaacgtctaggccccccgaaccacggggacgtggttttcctttgaaaaacacgataataccatggtgagcaagggcgaggagctgttcaccggggtggtgcccatcctggtcgagctggacggcgacgtaaacggccacaagttcagcgtgtccggcgagggcgagggcgatgccacctacggcaagctgaccctgaagttcatctgcaccaccggcaagctgcccgtgccctggcccaccctcgtgaccaccctgacctacggcgtgcagtgcttcagccgctaccccgaccacatgaagcagcacgacttcttcaagtccgccatgcccgaaggctacgtccaggagcgcaccatcttcttcaaggacgacggcaactacaagacccgcgccgaggtgaagttcgagggcgacaccctggtgaaccgcatcgagctgaagggcatcgacttcaaggaggacggcaacatcctggggcacaagctggagtacaactacaacagccacaacgtctatatcatggccgacaagcagaagaacggcatcaaggtgaacttcaagatccgccacaacatcgaggacggcagcgtgcagctcgccgaccactaccagcagaacacccccatcggcgacggccccgtgctgctgcccgacaaccactacctgagcacccagtccgccctgagcaaagaccccaacgagaagcgcgatcacatggtcctgctggagttcgtgaccgccgccgggatcactctcggcatggacgagctgtacaagtaacaccggtggcgcgttaagtcgacaatcaacctctggattacaaaatttgtgaaagattgactggtattcttaactatgttgctccttttacgctatgtggatacgctgctttaatgcctttgtatcatgctattgcttcccgtatggctttcattttctcctccttgtataaatcctggttgctgtctctttatgaggagttgtggcccgttgtcaggcaacgtggcgtggtgtgcactgtgtttgctgacgcaacccccactggttggggcattgccaccacctgtcagctcctttccgggactttcgctttccccctccctattgccacggcggaactcatcgccgcctgccttgcccgctgctggacaggggctcggctgttgggcactgacaattccgtggtgttgtcggggaaatcatcgtcctttccttggctgctcgcctgtgttgccacctggattctgcgcgggacgtccttctgctacgtcccttcggccctcaatccagcggaccttccttcccgcggcctgctgccggctctgcggcctcttccgcgtcttcgccttcgccctcagacgagtcggatctccctttgggccgcctccccgcgtcgactttaagaccaatgacttacaaggcagctgtagatcttagccactttttaaaagaaaaggggggactggaagggctaattcactcccaacgaagacaagatctgctttttgcttgtactgggtctctctggttagaccagatctgagcctgggagctctctggctaactagggaacccactgcttaagcctcaataaagcttgccttgagtgcttcaagtagtgtgtgcccgtctgttgtgtgactctggtaactagagatccctcagacccttttagtcagtgtggaaaatctctagcagtacgtatagtagttcatgtcatcttattattcagtatttataacttgcaaagaaatgaatatcagagagtgagaggaacttgtttattgcagcttataatggttacaaataaagcaatagcatcacaaatttcacaaataaagcatttttttcactgcattctagttgtggtttgtccaaactcatcaatgtatcttatcatgtctggctctagctatcccgcccctaactccgcccatcccgcccctaactccgcccagttccgcccattctccgccccatggctgactaattttttttatttatgcagaggccgaggccgcctcggcctctgagctattccagaagtagtgaggaggcttttttggaggcctagggacgtacccaattcgccctatagtgagtcgtattacgcgcgctcactggccgtcgttttacaacgtcgtgactgggaaaaccctggcgttacccaacttaatcgccttgcagcacatccccctttcgccagctggcgtaatagcgaagaggcccgcaccgatcgcccttcccaacagttgcgcagcctgaatggcgaatgggacgcgccctgtagcggcgcattaagcgcggcgggtgtggtggttacgcgcagcgtgaccgctacacttgccagcgccctagcgcccgctcctttcgctttcttcccttcctttctcgccacgttcgccggctttccccgtcaagctctaaatcgggggctccctttagggttccgatttagtgctttacggcacctcgaccccaaaaaacttgattagggtgatggttcacgtagtgggccatcgccctgatagacggtttttcgccctttgacgttggagtccacgttctttaatagtggactcttgttccaaactggaacaacactcaaccctatctcggtctattcttttgatttataagggattttgccgatttcggcctattggttaaaaaatgagctgatttaacaaaaatttaacgcgaattttaacaaaatattaacgcttacaatttaggtggcacttttcggggaaatgtgcgcggaacccctatttgtttatttttctaaatacattcaaatatgtatccgctcatgagacaataaccctgataaatgcttcaataatattgaaaaaggaagagtatgagtattcaacatttccgtgtcgcccttattcccttttttgcggcattttgccttcctgtttttgctcacccagaaacgctggtgaaagtaaaagatgctgaagatcagttgggtgcacgagtgggttacatcgaactggatctcaacagcggtaagatccttgagagttttcgccccgaagaacgttttccaatgatgagcacttttaaagttctgctatgtggcgcggtattatcccgtattgacgccgggcaagagcaactcggtcgccgcatacactattctcagaatgacttggttgagtactcaccagtcacagaaaagcatcttacggatggcatgacagtaagagaattatgcagtgctgccataaccatgagtgataacactgcggccaacttacttctgacaacgatcggaggaccgaaggagctaaccgcttttttgcacaacatgggggatcatgtaactcgccttgatcgttgggaaccggagctgaatgaagccataccaaacgacgagcgtgacaccacgatgcctgtagcaatggcaacaacgttgcgcaaactattaactggcgaactacttactctagcttcccggcaacaattaatagactggatggaggcggataaagttgcaggaccacttctgcgctcggcccttccggctggctggtttattgctgataaatctggagccggtgagcgtgggtctcgcggtatcattgcagcactggggccagatggtaagccctcccgtatcgtagttatctacacgacggggagtcaggcaactatggatgaacgaaatagacagatcgctgagataggtgcctcactgattaagcattggtaactgtcagaccaagtttactcatatatactttagattgatttaaaacttcatttttaatttaaaaggatctaggtgaagatcctttttgataatctcatgaccaaaatcccttaacgtgagttttcgttccactgagcgtcagaccccgtagaaaagatcaaaggatcttcttgagatcctttttttctgcgcgtaatctgctgcttgcaaacaaaaaaaccaccgctaccagcggtggtttgtttgccggatcaagagctaccaactctttttccgaaggtaactggcttcagcagagcgcagataccaaatactgttcttctagtgtagccgtagttaggccaccacttcaagaactctgtagcaccgcctacatacctcgctctgctaatcctgttaccagtggctgctgccagtggcgataagtcgtgtcttaccgggttggactcaagacgatagttaccggataaggcgcagcggtcgggctgaacggggggttcgtgcacacagcccagcttggagcgaacgacctacaccgaactgagatacctacagcgtgagctatgagaaagcgccacgcttcccgaagggagaaaggcggacaggtatccggtaagcggcagggtcggaacaggagagcgcacgagggagcttccagggggaaacgcctggtatctttatagtcctgtcgggtttcgccacctctgacttgagcgtcgatttttgtgatgctcgtcaggggggcggagcctatggaaaaacgccagcaacgcggcctttttacggttcctggccttttgctggccttttgctcacatgttctttcctgcgttatcccctgattctgtggataaccgtattaccgcctttgagtgagctgataccgctcgccgcagccgaacgaccgagcgcagcgagtcagtgagcgaggaagcggaagagcgcccaatacgcaaaccgcctctccccgcgcgttggccgattcattaatgcagctggcacgacaggtttcccgactggaaagcgggcagtgagcgcaacgcaattaatgtgagttagctcactcattaggcaccccaggctttacactttatgcttccggctcgtatgttgtgtggaattgtgagcggataacaatttcacacaggaaacagctatgaccatgattacgccaagcgcgcaattaaccctcactaaagggaacaaaagctggagctgcaagcttaatgtagtcttatgcaatactcttgtagtcttgcaacatggtaacgatgagttagcaacatgccttacaaggagagaaaaagcaccgtgcatgccgattggtggaagtaaggtggtacgatcgtgccttattaggaaggcaacagacgggtctgacatggattggacgaaccactgaattgccgcattgcagagatattgtatttaagtgcctagctcgatacataaacgggtctctctggttagaccagatctgagcctgggagctctctggctaactagggaacccactgcttaagcctcaataaagcttgccttgagtgcttcaagtagtgtgtgcccgtctgttgtgtgactctggtaactagagatccctcagacccttttagtcagtgtggaaaatctctagcagtggcgcccgaacagggacttgaaagcgaaagggaaaccagaggagctctctcgacgcaggactcggcttgctgaagcgcgcacggcaagaggcgaggggcggcgactggtgagtacgccaaaaattttgactagcggaggctagaaggagagagatgggtgcgagagcgtcagtattaagcgggggagaattagatcgcgatgggaaaaaattcggttaaggccagggggaaagaaaaaatataaattaaaacatatagtatgggcaagcagggagctagaacgattcgcagttaatcctggcctgttagaaacatcagaaggctgtagacaaatactgggacagctacaaccatcccttcagacaggatcagaagaacttagatcattatataatacagtagcaaccctctattgtgtgcatcaaaggatagagataaaagacaccaaggaagctttagacaagatagaggaagagcaaaacaaaagtaagaccaccgcacagcaagcggccgctgatcttcagacctggaggaggagatatgagggacaattggagaagtgaattatataaatataaagtagtaaaaattgaaccattaggagtagcacccaccaaggcaaagagaagagtggtgcagagagaaaaaagagcagtgggaataggagctttgttccttgggttcttgggagcagcaggaagcactatgggcgcagcgtcaatgacgctgacggtacaggccagacaattattgtctggtatagtgcagcagcagaacaatttgctgagggctattgaggcgcaacagcatctgttgcaactcacagtctggggcatcaagcagctccaggcaagaatcctggctgtggaaagatacctaaaggatcaacagctcctggggatttggggttgctctggaaaactcatttgcaccactgctgtgccttggaatgctagttggagtaataaatctctggaacagatttggaatcacacgacctggatggagtgggacagagaaattaacaattacacaagcttaatacactccttaattgaagaatcgcaaaaccagcaagaaaagaatgaacaagaattattggaattagataaatgggcaagtttgtggaattggtttaacataacaaattggctgtggtatataaaattattcataatgatagtaggaggcttggtaggtttaagaatagtttttgctgtactttctatagtgaatagagttaggcagggatattcaccattatcgtttcagacccacctcccaaccccgaggggacccttgcgccttttccaaggcagccctgggtttgcgcagggacgcggctgctctgggcgtggttccgggaaacgcagcggcgccgaccctgggtctcgcacattcttcacgtccgttcgcagcgtcacccggatcttcgccgctacccttgtgggccccccggcgacgcttcctgctccgcccctaagtcgggaaggttccttgcggttcgcggcgtgccggacgtgacaaacggaagccgcacgtctcactagtaccctcgcagacggacagcgccagggagcaatggcagcgcgccgaccgcgatgggctgtggccaatagcggctgctcagcagggcgcgccgagagcagcggccgggaaggggcggtgcgggaggcggggtgtggggcggtagtgtgggccctgttcctgcccgcgcggtgttccgcattctgcaagcctccggagcgcacgtcggcagtcggctccctcgttgaccgaatcaccgacctctctccccagggggtacccagctgtctagagaattctagatcttgagacaaatggcagtattcatccacaattttaaaagaaaaggggggattggggggtacagtgcaggggaaagaatagtagacataatagcaacagacatacaaactaaagaattacaaaaacaaattacaaaaattcaaaattttcgggtttattacagggacagcagagatccactttggcgccggctcgaggggg

SEQ ID NO: 183 - protein, 191 aa, Artificial Sequence
  Synthetic Polypeptide
MSPEIEKLSQSDIYWDSIVSITETGVEEVFDLTVPGPHNFVANDIIVHNSNNVLTDNGRITAVIDWSEAMFGDSQYEVANIFFWRPWLACLSYETEILTVEYGLLPIGKIVEKRIECTVYSVDNNGNIYTQPVAQWHDRGEQEVFEYCLEDGSLIRATKDHKFMTVDGQMLPIDEIFERELDLMRVDNLPN

SEQ ID NO: 184 - DNA, 9390 bp, Artificial Sequence
  Synthetic Polynucleotide
cccggggttattaatagtaatcaattacggggtcattagttcatagcccatatatggagttccgcgttacataacttacggtaaatggcccgcctggctgaccgcccaacgacccccgcccattgacgtcaataatgacgtatgttcccatagtaacgccaatagggactttccattgacgtcaatgggtggagtatttacggtaaactgcccacttggcagtacatcaagtgtatcatatgccaagtacgccccctattgacgtcaatgacggtaaatggcccgcctggcattatgcccagtacatgaccttatgggactttcctacttggcagtacatctacgtattagtcatcgctattaccatggtgatgcggttttggcagtacatcaatgggcgtggatagcggtttgactcacggggatttccaagtctccaccccattgacgtcaatgggagtttgttttggcaccaaaatcaacgggactttccaaaatgtcgtaacaactccgccccattgacgcaaatgggcggtaggcgtgtacggtgggaggtctatataagcagagctctctggctaactgtcgggatcaacaagtttgtacaaaaaagcaggctccgaattcaccggtgccgccaccatgagtcccgaaatcgaaaagctctctcagagcgatatatattgggactccatcgtaagcataacagagacgggggtcgaggaggtgttcgatctgacagttcctgggcctcataatttcgtagcgaacgacatcattgtacataactccaacaatgtcctgacggacaatggccgcataacagcggtcattgactggagcgaggcgatgttcggggattcccaatacgaggtcgccaacatcttcttctggaggccgtggttggcttgtatggagcagcagacgcgctacttcgagcggaggcatccggagcttgcaggatcgccgcggctccgggcgtatatgctccgcattggtcttgaccaactctatcagagcttggttgacggcaatttcgatgatgcagcttgggcgcagggtcgatgcctttcatacgagaccgagatcctgactgtcgagtacggattgcttcctatcggcaaaatcgtggagaagaggattgaatgtaccgtctattcagtcgataataatgggaacatctacacacagcccgtggctcaatggcacgacagaggagagcaggaagtttttgaatactgtctcgaggacggatccctcatccgcgctactaaagatcataagtttatgaccgtggacggccagatgctgccaattgacgaaatttttgaacgagagctggatctgatgagagtcgacaaccttccaaactgattaattaagaattcgacccagctttcttgtacaaagtggttggtaagcctatccctaaccctctcctcggtctcgattctacgtagtaatgagctagcagtctcgaggttaacgaattccgccccccccctaacgttactggccgaagccgcttggaataaggccggtgtgcgcttgtctatatgttattttccaccatattgccgtcttttggcaatgtgagggcccggaaacctggccctgtcttcttgacgagcattcctaggggtctttcccctctcgccaaaggaatgcaaggtctgttgaatgtcgtgaaggaagcagttcctctggaagcttcttgaagacaaacaacgtctgtagcgaccctttgcaggcagcggaaccccccacctggcgacaggtgcccctgcggccaaaagccacgtgtataagatacacctgcaaaggcggcacaaccccagtgccacgttgtgagttggatagttgtggaaagagtcaaatggctctcctcaagcgtattcaacaaggggctgaaggatgcccagaaggtaccccattgtatgggatctgatctggggcctcggtgcacatgctttacatgtgtttagtcgaggttaaaaaaacgtctaggccccccgaaccacggggacgtggttttcctttgaaaaacacgataataccatggtgagcaagggcgaggagctgttcaccggggtggtgcccatcctggtcgagctggacggcgacgtaaacggccacaagttcagcgtgtccggcgagggcgagggcgatgccacctacggcaagctgaccctgaagttcatctgcaccaccggcaagctgcccgtgccctggcccaccctcgtgaccaccctgacctacggcgtgcagtgcttcagccgctaccccgaccacatgaagcagcacgacttcttcaagtccgccatgcccgaaggctacgtccaggagcgcaccatcttcttcaaggacgacggcaactacaagacccgcgccgaggtgaagttcgagggcgacaccctggtgaaccgcatcgagctgaagggcatcgacttcaaggaggacggcaacatcctggggcacaagctggagtacaactacaacagccacaacgtctatatcatggccgacaagcagaagaacggcatcaaggtgaacttcaagatccgccacaacatcgaggacggcagcgtgcagctcgccgaccactaccagcagaacacccccatcggcgacggccccgtgctgctgcccgacaaccactacctgagcacccagtccgccctgagcaaagaccccaacgagaagcgcgatcacatggtcctgctggagttcgtgaccgccgccgggatcactctcggcatggacgagctgtacaagtaacaccggtggcgcgttaagtcgacaatcaacctctggattacaaaatttgtgaaagattgactggtattcttaactatgttgctccttttacgctatgtggatacgctgctttaatgcctttgtatcatgctattgcttcccgtatggctttcattttctcctccttgtataaatcctggttgctgtctctttatgaggagttgtggcccgttgtcaggcaacgtggcgtggtgtgcactgtgtttgctgacgcaacccccactggttggggcattgccaccacctgtcagctcctttccgggactttcgctttccccctccctattgccacggcggaactcatcgccgcctgccttgcccgctgctggacaggggctcggctgttgggcactgacaattccgtggtgttgtcggggaaatcatcgtcctttccttggctgctcgcctgtgttgccacctggattctgcgcgggacgtccttctgctacgtcccttcggccctcaatccagcggaccttccttcccgcggcctgctgccggctctgcggcctcttccgcgtcttcgccttcgccctcagacgagtcggatctccctttgggccgcctccccgcgtcgactttaagaccaatgacttacaaggcagctgtagatcttagccactttttaaaagaaaaggggggactggaagggctaattcactcccaacgaagacaagatctgctttttgcttgtactgggtctctctggttagaccagatctgagcctgggagctctctggctaactagggaacccactgcttaagcctcaataaagcttgccttgagtgcttcaagtagtgtgtgcccgtctgttgtgtgactctggtaactagagatccctcagacccttttagtcagtgtggaaaatctctagcagtacgtatagtagttcatgtcatcttattattcagtatttataacttgcaaagaaatgaatatcagagagtgagaggaacttgtttattgcagcttataatggttacaaataaagcaatagcatcacaaatttcacaaataaagcatttttttcactgcattctagttgtggtttgtccaaactcatcaatgtatcttatcatgtctggctctagctatcccgcccctaactccgcccatcccgcccctaactccgcccagttccgcccattctccgccccatggctgactaattttttttatttatgcagaggccgaggccgcctcggcctctgagctattccagaagtagtgaggaggcttttttggaggcctagggacgtacccaattcgccctatagtgagtcgtattacgcgcgctcactggccgtcgttttacaacgtcgtgactgggaaaaccctggcgttacccaacttaatcgccttgcagcacatccccctttcgccagctggcgtaatagcgaagaggcccgcaccgatcgcccttcccaacagttgcgcagcctgaatggcgaatgggacgcgccctgtagcggcgcattaagcgcggcgggtgtggtggttacgcgcagcgtgaccgctacacttgccagcgccctagcgcccgctcctttcgctttcttcccttcctttctcgccacgttcgccggctttccccgtcaagctctaaatcgggggctccctttagggttccgatttagtgctttacggcacctcgaccccaaaaaacttgattagggtgatggttcacgtagtgggccatcgccctgatagacggtttttcgccctttgacgttggagtccacgttctttaatagtggactcttgttccaaactggaacaacactcaaccctatctcggtctattcttttgatttataagggattttgccgatttcggcctattggttaaaaaatgagctgatttaacaaaaatttaacgcgaattttaacaaaatattaacgcttacaatttaggtggcacttttcggggaaatgtgcgcggaacccctatttgtttatttttctaaatacattcaaatatgtatccgctcatgagacaataaccctgataaatgcttcaataatattgaaaaaggaagagtatgagtattcaacatttccgtgtcgcccttattcccttttttgcggcattttgccttcctgtttttgctcacccagaaacgctggtgaaagtaaaagatgctgaagatcagttgggtgcacgagtgggttacatcgaactggatctcaacagcggtaagatccttgagagttttcgccccgaagaacgttttccaatgatgagcacttttaaagttctgctatgtggcgcggtattatcccgtattgacgccgggcaagagcaactcggtcgccgcatacactattctcagaatgacttggttgagtactcaccagtcacagaaaagcatcttacggatggcatgacagtaagagaattatgcagtgctgccataaccatgagtgataacactgcggccaacttacttctgacaacgatcggaggaccgaaggagctaaccgcttttttgcacaacatgggggatcatgtaactcgccttgatcgttgggaaccggagctgaatgaagccataccaaacgacgagcgtgacaccacgatgcctgtagcaatggcaacaacgttgcgcaaactattaactggcgaactacttactctagcttcccggcaacaattaatagactggatggaggcggataaagttgcaggaccacttctgcgctcggcccttccggctggctggtttattgctgataaatctggagccggtgagcgtgggtctcgcggtatcattgcagcactggggccagatggtaagccctcccgtatcgtagttatctacacgacggggagtcaggcaactatggatgaacgaaatagacagatcgctgagataggtgcctcactgattaagcattggtaactgtcagaccaagtttactcatatatactttagattgatttaaaacttcatttttaatttaaaaggatctaggtgaagatcctttttgataatctcatgaccaaaatcccttaacgtgagttttcgttccactgagcgtcagaccccgtagaaaagatcaaaggatcttcttgagatcctttttttctgcgcgtaatctgctgcttgcaaacaaaaaaaccaccgctaccagcggtggtttgtttgccggatcaagagctaccaactctttttccgaaggtaactggcttcagcagagcgcagataccaaatactgttcttctagtgtagccgtagttaggccaccacttcaagaactctgtagcaccgcctacatacctcgctctgctaatcctgttaccagtggctgctgccagtggcgataagtcgtgtcttaccgggttggactcaagacgatagttaccggataaggcgcagcggtcgggctgaacggggggttcgtgcacacagcccagcttggagcgaacgacctacaccgaactgagatacctacagcgtgagctatgagaaagcgccacgcttcccgaagggagaaaggcggacaggtatccggtaagcggcagggtcggaacaggagagcgcacgagggagcttccagggggaaacgcctggtatctttatagtcctgtcgggtttcgccacctctgacttgagcgtcgatttttgtgatgctcgtcaggggggcggagcctatggaaaaacgccagcaacgcggcctttttacggttcctggccttttgctggccttttgctcacatgttctttcctgcgttatcccctgattctgtggataaccgtattaccgcctttgagtgagctgataccgctcgccgcagccgaacgaccgagcgcagcgagtcagtgagcgaggaagcggaagagcgcccaatacgcaaaccgcctctccccgcgcgttggccgattcattaatgcagctggcacgacaggtttcccgactggaaagcgggcagtgagcgcaacgcaattaatgtgagttagctcactcattaggcaccccaggctttacactttatgcttccggctcgtatgttgtgtggaattgtgagcggataacaatttcacacaggaaacagctatgaccatgattacgccaagcgcgcaattaaccctcactaaagggaacaaaagctggagctgcaagcttaatgtagtcttatgcaatactcttgtagtcttgcaacatggtaacgatgagttagcaacatgccttacaaggagagaaaaagcaccgtgcatgccgattggtggaagtaaggtggtacgatcgtgccttattaggaaggcaacagacgggtctgacatggattggacgaaccactgaattgccgcattgcagagatattgtatttaagtgcctagctcgatacataaacgggtctctctggttagaccagatctgagcctgggagctctctggctaactagggaacccactgcttaagcctcaataaagcttgccttgagtgcttcaagtagtgtgtgcccgtctgttgtgtgactctggtaactagagatccctcagacccttttagtcagtgtggaaaatctctagcagtggcgcccgaacagggacttgaaagcgaaagggaaaccagaggagctctctcgacgcaggactcggcttgctgaagcgcgcacggcaagaggcgaggggcggcgactggtgagtacgccaaaaattttgactagcggaggctagaaggagagagatgggtgcgagagcgtcagtattaagcgggggagaattagatcgcgatgggaaaaaattcggttaaggccagggggaaagaaaaaatataaattaaaacatatagtatgggcaagcagggagctagaacgattcgcagttaatcctggcctgttagaaacatcagaaggctgtagacaaatactgggacagctacaaccatcccttcagacaggatcagaagaacttagatcattatataatacagtagcaaccctctattgtgtgcatcaaaggatagagataaaagacaccaaggaagctttagacaagatagaggaagagcaaaacaaaagtaagaccaccgcacagcaagcggccgctgatcttcagacctggaggaggagatatgagggacaattggagaagtgaattatataaatataaagtagtaaaaattgaaccattaggagtagcacccaccaaggcaaagagaagagtggtgcagagagaaaaaagagcagtgggaataggagctttgttccttgggttcttgggagcagcaggaagcactatgggcgcagcgtcaatgacgctgacggtacaggccagacaattattgtctggtatagtgcagcagcagaacaatttgctgagggctattgaggcgcaacagcatctgttgcaactcacagtctggggcatcaagcagctccaggcaagaatcctggctgtggaaagatacctaaaggatcaacagctcctggggatttggggttgctctggaaaactcatttgcaccactgctgtgccttggaatgctagttggagtaataaatctctggaacagatttggaatcacacgacctggatggagtgggacagagaaattaacaattacacaagcttaatacactccttaattgaagaatcgcaaaaccagcaagaaaagaatgaacaagaattattggaattagataaatgggcaagtttgtggaattggtttaacataacaaattggctgtggtatataaaattattcataatgatagtaggaggcttggtaggtttaagaatagtttttgctgtactttctatagtgaatagagttaggcagggatattcaccattatcgtttcagacccacctcccaaccccgaggggacccttgcgccttttccaaggcagccctgggtttgcgcagggacgcggctgctctgggcgtggttccgggaaacgcagcggcgccgaccctgggtctcgcacattcttcacgtccgttcgcagcgtcacccggatcttcgccgctacccttgtgggccccccggcgacgcttcctgctccgcccctaagtcgggaaggttccttgcggttcgcggcgtgccggacgtgacaaacggaagccgcacgtctcactagtaccctcgcagacggacagcgccagggagcaatggcagcgcgccgaccgcgatgggctgtggccaatagcggctgctcagcagggcgcgccgagagcagcggccgggaaggggcggtgcgggaggcggggtgtggggcggtagtgtgggccctgttcctgcccgcgcggtgttccgcattctgcaagcctccggagcgcacgtcggcagtcggctccctcgttgaccgaatcaccgacctctctccccagggggtacccagctgtctagagaattctagatcttgagacaaatggcagtattcatccacaattttaaaagaaaaggggggattggggggtacagtgcaggggaaagaatagtagacataatagcaacagacatacaaactaaagaattacaaaaacaaattacaaaaattcaaaattttcgggtttattacagggacagcagagatccactttggcgccggctcgaggggg

SEQ ID NO: 185 - protein, 243 aa, Artificial Sequence
  Synthetic Polypeptide
MSPEIEKLSQSDIYWDSIVSITETGVEEVFDLTVPGPHNFVANDIIVHNSNNVLTDNGRITAVIDWSEAMFGDSQYEVANIFFWRPWLACMEQQTRYFERRHPELAGSPRLRAYMLRIGLDQLYQSLVDGNFDDAAWAQGRCLSYETEILTVEYGLLPIGKIVEKRIECTVYSVDNNGNIYTQPVAQWHDRGEQEVFEYCLEDGSLIRATKDHKFMTVDGQMLPIDEIFERELDLMRVDNLPN

SEQ ID NO: 186 - DNA, 10263 bp, Artificial Sequence
  Synthetic Polynucleotide
cccggggttattaatagtaatcaattacggggtcattagttcatagcccatatatggagttccgcgttacataacttacggtaaatggcccgcctggctgaccgcccaacgacccccgcccattgacgtcaataatgacgtatgttcccatagtaacgccaatagggactttccattgacgtcaatgggtggagtatttacggtaaactgcccacttggcagtacatcaagtgtatcatatgccaagtacgccccctattgacgtcaatgacggtaaatggcccgcctggcattatgcccagtacatgaccttatgggactttcctacttggcagtacatctacgtattagtcatcgctattaccatggtgatgcggttttggcagtacatcaatgggcgtggatagcggtttgactcacggggatttccaagtctccaccccattgacgtcaatgggagtttgttttggcaccaaaatcaacgggactttccaaaatgtcgtaacaactccgccccattgacgcaaatgggcggtaggcgtgtacggtgggaggtctatataagcagagctctctggctaactgtcgggatcaacaagtttgtacaaaaaagctgaacgagaaacgtaaaatgatataaatatcaatatattaaattagattttgcataaaaaacagactacataatactgtaaaacacaacatatccagtcactatggcggccgcattaggcaccccaggctttacactttatgcttccggctcgtataatgtgtggattttgagttaggatccgtcgagattttcaggagctaaggaagctaaaatggagaaaaaaatcactggatataccaccgttgatatatcccaatggcatcgtaaagaacattttgaggcatttcagtcagttgctcaatgtacctataaccagaccgttcagctggatattacggcctttttaaagaccgtaaagaaaaataagcacaagttttatccggcctttattcacattcttgcccgcctgatgaatgctcatccggaattccgtatggcaatgaaagacggtgagctggtgatatgggatagtgttcacccttgttacaccgttttccatgagcaaactgaaacgttttcatcgctctggagtgaataccacgacgatttccggcagtttctacacatatattcgcaagatgtggcgtgttacggtgaaaacctggcctatttccctaaagggtttattgagaatatgtttttcgtctcagccaatccctgggtgagtttcaccagttttgatttaaacgtggccaatatggacaacttcttcgcccccgttttcaccatgggcaaatattatacgcaaggcgacaaggtgctgatgccgctggcgattcaggttcatcatgccgtttgtgatggcttccatgtcggcagaatgcttaatgaattacaacagtactgcgatgagtggcagggcggggcgtaaagatctggatccggcttactaaaagccagataacagtatgcgtatttgcgcgctgatttttgcggtataagaatatatactgatatgtatacccgaagtatgtcaaaaagaggtatgctatgaagcagcgtattacagtgacagttgacagcgacagctatcagttgctcaaggcatatatgatgtcaatatctccggtctggtaagcacaaccatgcagaatgaagcccgtcgtctgcgtgccgaacgctggaaagcggaaaatcaggaagggatggctgaggtcgcccggtttattgaaatgaacggctcttttgctgacgagaacaggggctggtgaaatgcagtttaaggtttacacctataaaagagagagccgttatcgtctgtttgtggatgtacagagtgatattattgacacgcccgggcgacggatggtgatccccctggccagtgcacgtctgctgtcagataaagtctcccgtgaactttacccggtggtgcatatcggggatgaaagctggcgcatgatgaccaccgatatggccagtgtgccggtctccgttatcggggaagaagtggctgatctcagccaccgcgaaaatgacatcaaaaacgccattaacctgatgttctggggaatataaatgtcaggctcccttatacacagccagtctgcaggtcgaccatagtgactggatatgttgtgttttacagtattatgtagtctgttttttatgcaaaatctaatttaatatattgatatttatatcattttacgtttctcgttcagctttcttgtacaaagtggttggtaagcctatccctaaccctctcctcggtctcgattctacgtagtaatgagctagcagtctcgaggttaacgaattccgccccccccctaacgttactggccgaagccgcttggaataaggccggtgtgcgcttgtctatatgttattttccaccatattgccgtcttttggcaatgtgagggcccggaaacctggccctgtcttcttgacgagcattcctaggggtctttcccctctcgccaaaggaatgcaaggtctgttgaatgtcgtgaaggaagcagttcctctggaagcttcttgaagacaaacaacgtctgtagcgaccctttgcaggcagcggaaccccccacctggcgacaggtgcccctgcggccaaaagccacgtgtataagatacacctgcaaaggcggcacaaccccagtgccacgttgtgagttggatagttgtggaaagagtcaaatggctctcctcaagcgtattcaacaaggggctgaaggatgcccagaaggtaccccattgtatgggatctgatctggggcctcggtgcacatgctttacatgtgtttagtcgaggttaaaaaaacgtctaggccccccgaaccacggggacgtggttttcctttgaaaaacacgataataccatggccatgagcgagctgattaaggagaacatgcacatgaagctgtacatggagggcaccgtggacaaccatcacttcaagtgcacatccgagggcgaaggcaagccctacgagggcacccagaccatgagaatcaaggtggtcgagggcggccctctccccttcgccttcgacatcctggctactagcttcctctacggcagcaagaccttcatcaaccacacccagggcatccccgacttcttcaagcagtccttccctgagggcttcacatgggagagagtcaccacatacgaagacgggggcgtgctgaccgctacccaggacaccagcctccaggacggctgcctcatctacaacgtcaagatcagaggggtgaacttcacatccaacggccctgtgatgcagaagaaaacactcggctgggaggccttcaccgagacgctgtaccccgctgacggcggcctggaaggcagaaacgacatggccctgaagctcgtgggcgggagccatctgatcgcaaacatcaagaccacatatagatccaagaaacccgctaagaacctcaagatgcctggcgtctactatgtggactacagactggaaagaatcaaggaggccaacaacgagacctacgtcgagcagcacgaggtggcagtggccagatactgcgacctccctagcaaactggggcacaagcttaattaacaccggtggcgcgttaagtcgacaatcaacctctggattacaaaatttgtgaaagattgactggtattcttaactatgttgctccttttacgctatgtggatacgctgctttaatgcctttgtatcatgctattgcttcccgtatggctttcattttctcctccttgtataaatcctggttgctgtctctttatgaggagttgtggcccgttgtcaggcaacgtggcgtggtgtgcactgtgtttgctgacgcaacccccactggttggggcattgccaccacctgtcagctcctttccgggactttcgctttccccctccctattgccacggcggaactcatcgccgcctgccttgcccgctgctggacaggggctcggctgttgggcactgacaattccgtggtgttgtcggggaaatcatcgtcctttccttggctgctcgcctgtgttgccacctggattctgcgcgggacgtccttctgctacgtcccttcggccctcaatccagcggaccttccttcccgcggcctgctgccggctctgcggcctcttccgcgtcttcgccttcgccctcagacgagtcggatctccctttgggccgcctccccgcgtcgactttaagaccaatgacttacaaggcagctgtagatcttagccactttttaaaagaaaaggggggactggaagggctaattcactcccaacgaagacaagatctgctttttgcttgtactgggtctctctggttagaccagatctgagcctgggagctctctggctaactagggaacccactgcttaagcctcaataaagcttgccttgagtgcttcaagtagtgtgtgcccgtctgttgtgtgactctggtaactagagatccctcagacccttttagtcagtgtggaaaatctctagcagtacgtatagtagttcatgtcatcttattattcagtatttataacttgcaaagaaatgaatatcagagagtgagaggaacttgtttattgcagcttataatggttacaaataaagcaatagcatcacaaatttcacaaataaagcatttttttcactgcattctagttgtggtttgtccaaactcatcaatgtatcttatcatgtctggctctagctatcccgcccctaactccgcccatcccgcccctaactccgcccagttccgcccattctccgccccatggctgactaattttttttatttatgcagaggccgaggccgcctcggcctctgagctattccagaagtagtgaggaggcttttttggaggcctagggacgtacccaattcgccctatagtgagtcgtattacgcgcgctcactggccgtcgttttacaacgtcgtgactgggaaaaccctggcgttacccaacttaatcgccttgcagcacatccccctttcgccagctggcgtaatagcgaagaggcccgcaccgatcgcccttcccaacagttgcgcagcctgaatggcgaatgggacgcgccctgtagcggcgcattaagcgcggcgggtgtggtggttacgcgcagcgtgaccgctacacttgccagcgccctagcgcccgctcctttcgctttcttcccttcctttctcgccacgttcgccggctttccccgtcaagctctaaatcgggggctccctttagggttccgatttagtgctttacggcacctcgaccccaaaaaacttgattagggtgatggttcacgtagtgggccatcgccctgatagacggtttttcgccctttgacgttggagtccacgttctttaatagtggactcttgttccaaactggaacaacactcaaccctatctcggtctattcttttgatttataagggattttgccgatttcggcctattggttaaaaaatgagctgatttaacaaaaatttaacgcgaattttaacaaaatattaacgcttacaatttaggtggcacttttcggggaaatgtgcgcggaacccctatttgtttatttttctaaatacattcaaatatgtatccgctcatgagacaataaccctgataaatgcttcaataatattgaaaaaggaagagtatgagtattcaacatttccgtgtcgcccttattcccttttttgcggcattttgccttcctgtttttgctcacccagaaacgctggtgaaagtaaaagatgctgaagatcagttgggtgcacgagtgggttacatcgaactggatctcaacagcggtaagatccttgagagttttcgccccgaagaacgttttccaatgatgagcacttttaaagttctgctatgtggcgcggtattatcccgtattgacgccgggcaagagcaactcggtcgccgcatacactattctcagaatgacttggttgagtactcaccagtcacagaaaagcatcttacggatggcatgacagtaagagaattatgcagtgctgccataaccatgagtgataacactgcggccaacttacttctgacaacgatcggaggaccgaaggagctaaccgcttttttgcacaacatgggggatcatgtaactcgccttgatcgttgggaaccggagctgaatgaagccataccaaacgacgagcgtgacaccacgatgcctgtagcaatggcaacaacgttgcgcaaactattaactggcgaactacttactctagcttcccggcaacaattaatagactggatggaggcggataaagttgcaggaccacttctgcgctcggcccttccggctggctggtttattgctgataaatctggagccggtgagcgtgggtctcgcggtatcattgcagcactggggccagatggtaagccctcccgtatcgtagttatctacacgacggggagtcaggcaactatggatgaacgaaatagacagatcgctgagataggtgcctcactgattaagcattggtaactgtcagaccaagtttactcatatatactttagattgatttaaaacttcatttttaatttaaaaggatctaggtgaagatcctttttgataatctcatgaccaaaatcccttaacgtgagttttcgttccactgagcgtcagaccccgtagaaaagatcaaaggatcttcttgagatcctttttttctgcgcgtaatctgctgcttgcaaacaaaaaaaccaccgctaccagcggtggtttgtttgccggatcaagagctaccaactctttttccgaaggtaactggcttcagcagagcgcagataccaaatactgttcttctagtgtagccgtagttaggccaccacttcaagaactctgtagcaccgcctacatacctcgctctgctaatcctgttaccagtggctgctgccagtggcgataagtcgtgtcttaccgggttggactcaagacgatagttaccggataaggcgcagcggtcgggctgaacggggggttcgtgcacacagcccagcttggagcgaacgacctacaccgaactgagatacctacagcgtgagctatgagaaagcgccacgcttcccgaagggagaaaggcggacaggtatccggtaagcggcagggtcggaacaggagagcgcacgagggagcttccagggggaaacgcctggtatctttatagtcctgtcgggtttcgccacctctgacttgagcgtcgatttttgtgatgctcgtcaggggggcggagcctatggaaaaacgccagcaacgcggcctttttacggttcctggccttttgctggccttttgctcacatgttctttcctgcgttatcccctgattctgtggataaccgtattaccgcctttgagtgagctgataccgctcgccgcagccgaacgaccgagcgcagcgagtcagtgagcgaggaagcggaagagcgcccaatacgcaaaccgcctctccccgcgcgttggccgattcattaatgcagctggcacgacaggtttcccgactggaaagcgggcagtgagcgcaacgcaattaatgtgagttagctcactcattaggcaccccaggctttacactttatgcttccggctcgtatgttgtgtggaattgtgagcggataacaatttcacacaggaaacagctatgaccatgattacgccaagcgcgcaattaaccctcactaaagggaacaaaagctggagctgcaagcttaatgtagtcttatgcaatactcttgtagtcttgcaacatggtaacgatgagttagcaacatgccttacaaggagagaaaaagcaccgtgcatgccgattggtggaagtaaggtggtacgatcgtgccttattaggaaggcaacagacgggtctgacatggattggacgaaccactgaattgccgcattgcagagatattgtatttaagtgcctagctcgatacataaacgggtctctctggttagaccagatctgagcctgggagctctctggctaactagggaacccactgcttaagcctcaataaagcttgccttgagtgcttcaagtagtgtgtgcccgtctgttgtgtgactctggtaactagagatccctcagacccttttagtcagtgtggaaaatctctagcagtggcgcccgaacagggacttgaaagcgaaagggaaaccagaggagctctctcgacgcaggactcggcttgctgaagcgcgcacggcaagaggcgaggggcggcgactggtgagtacgccaaaaattttgactagcggaggctagaaggagagagatgggtgcgagagcgtcagtattaagcgggggagaattagatcgcgatgggaaaaaattcggttaaggccagggggaaagaaaaaatataaattaaaacatatagtatgggcaagcagggagctagaacgattcgcagttaatcctggcctgttagaaacatcagaaggctgtagacaaatactgggacagctacaaccatcccttcagacaggatcagaagaacttagatcattatataatacagtagcaaccctctattgtgtgcatcaaaggatagagataaaagacaccaaggaagctttagacaagatagaggaagagcaaaacaaaagtaagaccaccgcacagcaagcggccgctgatcttcagacctggaggaggagatatgagggacaattggagaagtgaattatataaatataaagtagtaaaaattgaaccattaggagtagcacccaccaaggcaaagagaagagtggtgcagagagaaaaaagagcagtgggaataggagctttgttccttgggttcttgggagcagcaggaagcactatgggcgcagcgtcaatgacgctgacggtacaggccagacaattattgtctggtatagtgcagcagcagaacaatttgctgagggctattgaggcgcaacagcatctgttgcaactcacagtctggggcatcaagcagctccaggcaagaatcctggctgtggaaagatacctaaaggatcaacagctcctggggatttggggttgctctggaaaactcatttgcaccactgctgtgccttggaatgctagttggagtaataaatctctggaacagatttggaatcacacgacctggatggagtgggacagagaaattaacaattacacaagcttaatacactccttaattgaagaatcgcaaaaccagcaagaaaagaatgaacaagaattattggaattagataaatgggcaagtttgtggaattggtttaacataacaaattggctgtggtatataaaattattcataatgatagtaggaggcttggtaggtttaagaatagtttttgctgtactttctatagtgaatagagttaggcagggatattcaccattatcgtttcagacccacctcccaaccccgaggggacccttgcgccttttccaaggcagccctgggtttgcgcagggacgcggctgctctgggcgtggttccgggaaacgcagcggcgccgaccctgggtctcgcacattcttcacgtccgttcgcagcgtcacccggatcttcgccgctacccttgtgggccccccggcgacgcttcctgctccgcccctaagtcgggaaggttccttgcggttcgcggcgtgccggacgtgacaaacggaagccgcacgtctcactagtaccctcgcagacggacagcgccagggagcaatggcagcgcgccgaccgcgatgggctgtggccaatagcggctgctcagcagggcgcgccgagagcagcggccgggaaggggcggtgcgggaggcggggtgtggggcggtagtgtgggccctgttcctgcccgcgcggtgttccgcattctgcaagcctccggagcgcacgtcggcagtcggctccctcgttgaccgaatcaccgacctctctccccagggggtacccagctgtctagagaattctagatcttgagacaaatggcagtattcatccacaattttaaaagaaaaggggggattggggggtacagtgcaggggaaagaatagtagacataatagcaacagacatacaaactaaagaattacaaaaacaaattacaaaaattcaaaattttcgggtttattacagggacagcagagatccactttggcgccggctcgaggggg

SEQ ID NO: 187 - DNA, 10275 bp, Artificial Sequence
  Synthetic Polynucleotide
cccggggttattaatagtaatcaattacggggtcattagttcatagcccatatatggagttccgcgttacataacttacggtaaatggcccgcctggctgaccgcccaacgacccccgcccattgacgtcaataatgacgtatgttcccatagtaacgccaatagggactttccattgacgtcaatgggtggagtatttacggtaaactgcccacttggcagtacatcaagtgtatcatatgccaagtacgccccctattgacgtcaatgacggtaaatggcccgcctggcattatgcccagtacatgaccttatgggactttcctacttggcagtacatctacgtattagtcatcgctattaccatggtgatgcggttttggcagtacatcaatgggcgtggatagcggtttgactcacggggatttccaagtctccaccccattgacgtcaatgggagtttgttttggcaccaaaatcaacgggactttccaaaatgtcgtaacaactccgccccattgacgcaaatgggcggtaggcgtgtacggtgggaggtctatataagcagagctctctggctaactgtcgggatcaacaagtttgtacaaaaaagctgaacgagaaacgtaaaatgatataaatatcaatatattaaattagattttgcataaaaaacagactacataatactgtaaaacacaacatatccagtcactatggcggccgcattaggcaccccaggctttacactttatgcttccggctcgtataatgtgtggattttgagttaggatccgtcgagattttcaggagctaaggaagctaaaatggagaaaaaaatcactggatataccaccgttgatatatcccaatggcatcgtaaagaacattttgaggcatttcagtcagttgctcaatgtacctataaccagaccgttcagctggatattacggcctttttaaagaccgtaaagaaaaataagcacaagttttatccggcctttattcacattcttgcccgcctgatgaatgctcatccggaattccgtatggcaatgaaagacggtgagctggtgatatgggatagtgttcacccttgttacaccgttttccatgagcaaactgaaacgttttcatcgctctggagtgaataccacgacgatttccggcagtttctacacatatattcgcaagatgtggcgtgttacggtgaaaacctggcctatttccctaaagggtttattgagaatatgtttttcgtctcagccaatccctgggtgagtttcaccagttttgatttaaacgtggccaatatggacaacttcttcgcccccgttttcaccatgggcaaatattatacgcaaggcgacaaggtgctgatgccgctggcgattcaggttcatcatgccgtttgtgatggcttccatgtcggcagaatgcttaatgaattacaacagtactgcgatgagtggcagggcggggcgtaaagatctggatccggcttactaaaagccagataacagtatgcgtatttgcgcgctgatttttgcggtataagaatatatactgatatgtatacccgaagtatgtcaaaaagaggtatgctatgaagcagcgtattacagtgacagttgacagcgacagctatcagttgctcaaggcatatatgatgtcaatatctccggtctggtaagcacaaccatgcagaatgaagcccgtcgtctgcgtgccgaacgctggaaagcggaaaatcaggaagggatggctgaggtcgcccggtttattgaaatgaacggctcttttgctgacgagaacaggggctggtgaaatgcagtttaaggtttacacctataaaagagagagccgttatcgtctgtttgtggatgtacagagtgatattattgacacgcccgggcgacggatggtgatccccctggccagtgcacgtctgctgtcagataaagtctcccgtgaactttacccggtggtgcatatcggggatgaaagctggcgcatgatgaccaccgatatggccagtgtgccggtctccgttatcggggaagaagtggctgatctcagccaccgcgaaaatgacatcaaaaacgccattaacctgatgttctggggaatataaatgtcaggctcccttatacacagccagtctgcaggtcgaccatagtgactggatatgttgtgttttacagtattatgtagtctgttttttatgcaaaatctaatttaatatattgatatttatatcattttacgtttctcgttcagctttcttgtacaaagtggttggtaagcctatccctaaccctctcctcggtctcgattctacgtagtaatgagctagcagtctcgaggttaacgaattccgccccccccctaacgttactggccgaagccgcttggaataaggccggtgtgcgcttgtctatatgttattttccaccatattgccgtcttttggcaatgtgagggcccggaaacctggccctgtcttcttgacgagcattcctaggggtctttcccctctcgccaaaggaatgcaaggtctgttgaatgtcgtgaaggaagcagttcctctggaagcttcttgaagacaaacaacgtctgtagcgaccctttgcaggcagcggaaccccccacctggcgacaggtgcccctgcggccaaaagccacgtgtataagatacacctgcaaaggcggcacaaccccagtgccacgttgtgagttggatagttgtggaaagagtcaaatggctctcctcaagcgtattcaacaaggggctgaaggatgcccagaaggtaccccattgtatgggatctgatctggggcctcggtgcacatgctttacatgtgtttagtcgaggttaaaaaaacgtctaggccccccgaaccacggggacgtggttttcctttgaaaaacacgataataccatggtgagcaagggcgaggagctgttcaccggggtggtgcccatcctggtcgagctggacggcgacgtaaacggccacaagttcagcgtgtccggcgagggcgagggcgatgccacctacggcaagctgaccctgaagttcatctgcaccaccggcaagctgcccgtgccctggcccaccctcgtgaccaccctgacctacggcgtgcagtgcttcagccgctaccccgaccacatgaagcagcacgacttcttcaagtccgccatgcccgaaggctacgtccaggagcgcaccatcttcttcaaggacgacggcaactacaagacccgcgccgaggtgaagttcgagggcgacaccctggtgaaccgcatcgagctgaagggcatcgacttcaaggaggacggcaacatcctggggcacaagctggagtacaactacaacagccacaacgtctatatcatggccgacaagcagaagaacggcatcaaggtgaacttcaagatccgccacaacatcgaggacggcagcgtgcagctcgccgaccactaccagcagaacacccccatcggcgacggccccgtgctgctgcccgacaaccactacctgagcacccagtccgccctgagcaaagaccccaacgagaagcgcgatcacatggtcctgctggagttcgtgaccgccgccgggatcactctcggcatggacgagctgtacaagtaacaccggtggcgcgttaagtcgacaatcaacctctggattacaaaatttgtgaaagattgactggtattcttaactatgttgctccttttacgctatgtggatacgctgctttaatgcctttgtatcatgctattgcttcccgtatggctttcattttctcctccttgtataaatcctggttgctgtctctttatgaggagttgtggcccgttgtcaggcaacgtggcgtggtgtgcactgtgtttgctgacgcaacccccactggttggggcattgccaccacctgtcagctcctttccgggactttcgctttccccctccctattgccacggcggaactcatcgccgcctgccttgcccgctgctggacaggggctcggctgttgggcactgacaattccgtggtgttgtcggggaaatcatcgtcctttccttggctgctcgcctgtgttgccacctggattctgcgcgggacgtccttctgctacgtcccttcggccctcaatccagcggaccttccttcccgcggcctgctgccggctctgcggcctcttccgcgtcttcgccttcgccctcagacgagtcggatctccctttgggccgcctccccgcgtcgactttaagaccaatgacttacaaggcagctgtagatcttagccactttttaaaagaaaaggggggactggaagggctaattcactcccaacgaagacaagatctgctttttgcttgtactgggtctctctggttagaccagatctgagcctgggagctctctggctaactagggaacccactgcttaagcctcaataaagcttgccttgagtgcttcaagtagtgtgtgcccgtctgttgtgtgactctggtaactagagatccctcagacccttttagtcagtgtggaaaatctctagcagtacgtatagtagttcatgtcatcttattattcagtatttataacttgcaaagaaatgaatatcagagagtgagaggaacttgtttattgcagcttataatggttacaaataaagcaatagcatcacaaatttcacaaataaagcatttttttcactgcattctagttgtggtttgtccaaactcatcaatgtatcttatcatgtctggctctagctatcccgcccctaactccgcccatcccgcccctaactccgcccagttccgcccattctccgccccatggctgactaattttttttatttatgcagaggccgaggccgcctcggcctctgagctattccagaagtagtgaggaggcttttttggaggcctagggacgtacccaattcgccctatagtgagtcgtattacgcgcgctcactggccgtcgttttacaacgtcgtgactgggaaaaccctggcgttacccaacttaatcgccttgcagcacatccccctttcgccagctggcgtaatagcgaagaggcccgcaccgatcgcccttcccaacagttgcgcagcctgaatggcgaatgggacgcgccctgtagcggcgcattaagcgcggcgggtgtggtggttacgcgcagcgtgaccgctacacttgccagcgccctagcgcccgctcctttcgctttcttcccttcctttctcgccacgttcgccggctttccccgtcaagctctaaatcgggggctccctttagggttccgatttagtgctttacggcacctcgaccccaaaaaacttgattagggtgatggttcacgtagtgggccatcgccctgatagacggtttttcgccctttgacgttggagtccacgttctttaatagtggactcttgttccaaactggaacaacactcaaccctatctcggtctattcttttgatttataagggattttgccgatttcggcctattggttaaaaaatgagctgatttaacaaaaatttaacgcgaattttaacaaaatattaacgcttacaatttaggtggcacttttcggggaaatgtgcgcggaacccctatttgtttatttttctaaatacattcaaatatgtatccgctcatgagacaataaccctgataaatgcttcaataatattgaaaaaggaagagtatgagtattcaacatttccgtgtcgcccttattcccttttttgcggcattttgccttcctgtttttgctcacccagaaacgctggtgaaagtaaaagatgctgaagatcagttgggtgcacgagtgggttacatcgaactggatctcaacagcggtaagatccttgagagttttcgccccgaagaacgttttccaatgatgagcacttttaaagttctgctatgtggcgcggtattatcccgtattgacgccgggcaagagcaactcggtcgccgcatacactattctcagaatgacttggttgagtactcaccagtcacagaaaagcatcttacggatggcatgacagtaagagaattatgcagtgctgccataaccatgagtgataacactgcggccaacttacttctgacaacgatcggaggaccgaaggagctaaccgcttttttgcacaacatgggggatcatgtaactcgccttgatcgttgggaaccggagctgaatgaagccataccaaacgacgagcgtgacaccacgatgcctgtagcaatggcaacaacgttgcgcaaactattaactggcgaactacttactctagcttcccggcaacaattaatagactggatggaggcggataaagttgcaggaccacttctgcgctcggcccttccggctggctggtttattgctgataaatctggagccggtgagcgtgggtctcgcggtatcattgcagcactggggccagatggtaagccctcccgtatcgtagttatctacacgacggggagtcaggcaactatggatgaacgaaatagacagatcgctgagataggtgcctcactgattaagcattggtaactgtcagaccaagtttactcatatatactttagattgatttaaaacttcatttttaatttaaaaggatctaggtgaagatcctttttgataatctcatgaccaaaatcccttaacgtgagttttcgttccactgagcgtcagaccccgtagaaaagatcaaaggatcttcttgagatcctttttttctgcgcgtaatctgctgcttgcaaacaaaaaaaccaccgctaccagcggtggtttgtttgccggatcaagagctaccaactctttttccgaaggtaactggcttcagcagagcgcagataccaaatactgttcttctagtgtagccgtagttaggccaccacttcaagaactctgtagcaccgcctacatacctcgctctgctaatcctgttaccagtggctgctgccagtggcgataagtcgtgtcttaccgggttggactcaagacgatagttaccggataaggcgcagcggtcgggctgaacggggggttcgtgcacacagcccagcttggagcgaacgacctacaccgaactgagatacctacagcgtgagctatgagaaagcgccacgcttcccgaagggagaaaggcggacaggtatccggtaagcggcagggtcggaacaggagagcgcacgagggagcttccagggggaaacgcctggtatctttatagtcctgtcgggtttcgccacctctgacttgagcgtcgatttttgtgatgctcgtcaggggggcggagcctatggaaaaacgccagcaacgcggcctttttacggttcctggccttttgctggccttttgctcacatgttctttcctgcgttatcccctgattctgtggataaccgtattaccgcctttgagtgagctgataccgctcgccgcagccgaacgaccgagcgcagcgagtcagtgagcgaggaagcggaagagcgcccaatacgcaaaccgcctctccccgcgcgttggccgattcattaatgcagctggcacgacaggtttcccgactggaaagcgggcagtgagcgcaacgcaattaatgtgagttagctcactcattaggcaccccaggctttacactttatgcttccggctcgtatgttgtgtggaattgtgagcggataacaatttcacacaggaaacagctatgaccatgattacgccaagcgcgcaattaaccctcactaaagggaacaaaagctggagctgcaagcttaatgtagtcttatgcaatactcttgtagtcttgcaacatggtaacgatgagttagcaacatgccttacaaggagagaaaaagcaccgtgcatgccgattggtggaagtaaggtggtacgatcgtgccttattaggaaggcaacagacgggtctgacatggattggacgaaccactgaattgccgcattgcagagatattgtatttaagtgcctagctcgatacataaacgggtctctctggttagaccagatctgagcctgggagctctctggctaactagggaacccactgcttaagcctcaataaagcttgccttgagtgcttcaagtagtgtgtgcccgtctgttgtgtgactctggtaactagagatccctcagacccttttagtcagtgtggaaaatctctagcagtggcgcccgaacagggacttgaaagcgaaagggaaaccagaggagctctctcgacgcaggactcggcttgctgaagcgcgcacggcaagaggcgaggggcggcgactggtgagtacgccaaaaattttgactagcggaggctagaaggagagagatgggtgcgagagcgtcagtattaagcgggggagaattagatcgcgatgggaaaaaattcggttaaggccagggggaaagaaaaaatataaattaaaacatatagtatgggcaagcagggagctagaacgattcgcagttaatcctggcctgttagaaacatcagaaggctgtagacaaatactgggacagctacaaccatcccttcagacaggatcagaagaacttagatcattatataatacagtagcaaccctctattgtgtgcatcaaaggatagagataaaagacaccaaggaagctttagacaagatagaggaagagcaaaacaaaagtaagaccaccgcacagcaagcggccgctgatcttcagacctggaggaggagatatgagggacaattggagaagtgaattatataaatataaagtagtaaaaattgaaccattaggagtagcacccaccaaggcaaagagaagagtggtgcagagagaaaaaagagcagtgggaataggagctttgttccttgggttcttgggagcagcaggaagcactatgggcgcagcgtcaatgacgctgacggtacaggccagacaattattgtctggtatagtgcagcagcagaacaatttgctgagggctattgaggcgcaacagcatctgttgcaactcacagtctggggcatcaagcagctccaggcaagaatcctggctgtggaaagatacctaaaggatcaacagctcctggggatttggggttgctctggaaaactcatttgcaccactgctgtgccttggaatgctagttggagtaataaatctctggaacagatttggaatcacacgacctggatggagtgggacagagaaattaacaattacacaagcttaatacactccttaattgaagaatcgcaaaaccagcaagaaaagaatgaacaagaattattggaattagataaatgggcaagtttgtggaattggtttaacataacaaattggctgtggtatataaaattattcataatgatagtaggaggcttggtaggtttaagaatagtttttgctgtactttctatagtgaatagagttaggcagggatattcaccattatcgtttcagacccacctcccaaccccgaggggacccttgcgccttttccaaggcagccctgggtttgcgcagggacgcggctgctctgggcgtggttccgggaaacgcagcggcgccgaccctgggtctcgcacattcttcacgtccgttcgcagcgtcacccggatcttcgccgctacccttgtgggccccccggcgacgcttcctgctccgcccctaagtcgggaaggttccttgcggttcgcggcgtgccggacgtgacaaacggaagccgcacgtctcactagtaccctcgcagacggacagcgccagggagcaatggcagcgcgccgaccgcgatgggctgtggccaatagcggctgctcagcagggcgcgccgagagcagcggccgggaaggggcggtgcgggaggcggggtgtggggcggtagtgtgggccctgttcctgcccgcgcggtgttccgcattctgcaagcctccggagcgcacgtcggcagtcggctccctcgttgaccgaatcaccgacctctctccccagggggtacccagctgtctagagaattctagatcttgagacaaatggcagtattcatccacaattttaaaagaaaaggggggattggggggtacagtgcaggggaaagaatagtagacataatagcaacagacatacaaactaaagaattacaaaaacaaattacaaaaattcaaaattttcgggtttattacagggacagcagagatccactttggcgccggctcgaggggg

SEQ ID NO: 188 - DNA, 10266 bp, Artificial Sequence
  Synthetic Polynucleotide
cccggggttattaatagtaatcaattacggggtcattagttcatagcccatatatggagttccgcgttacataacttacggtaaatggcccgcctggctgaccgcccaacgacccccgcccattgacgtcaataatgacgtatgttcccatagtaacgccaatagggactttccattgacgtcaatgggtggagtatttacggtaaactgcccacttggcagtacatcaagtgtatcatatgccaagtacgccccctattgacgtcaatgacggtaaatggcccgcctggcattatgcccagtacatgaccttatgggactttcctacttggcagtacatctacgtattagtcatcgctattaccatggtgatgcggttttggcagtacatcaatgggcgtggatagcggtttgactcacggggatttccaagtctccaccccattgacgtcaatgggagtttgttttggcaccaaaatcaacgggactttccaaaatgtcgtaacaactccgccccattgacgcaaatgggcggtaggcgtgtacggtgggaggtctatataagcagagctctctggctaactgtcgggatcaacaagtttgtacaaaaaagctgaacgagaaacgtaaaatgatataaatatcaatatattaaattagattttgcataaaaaacagactacataatactgtaaaacacaacatatccagtcactatggcggccgcattaggcaccccaggctttacactttatgcttccggctcgtataatgtgtggattttgagttaggatccgtcgagattttcaggagctaaggaagctaaaatggagaaaaaaatcactggatataccaccgttgatatatcccaatggcatcgtaaagaacattttgaggcatttcagtcagttgctcaatgtacctataaccagaccgttcagctggatattacggcctttttaaagaccgtaaagaaaaataagcacaagttttatccggcctttattcacattcttgcccgcctgatgaatgctcatccggaattccgtatggcaatgaaagacggtgagctggtgatatgggatagtgttcacccttgttacaccgttttccatgagcaaactgaaacgttttcatcgctctggagtgaataccacgacgatttccggcagtttctacacatatattcgcaagatgtggcgtgttacggtgaaaacctggcctatttccctaaagggtttattgagaatatgtttttcgtctcagccaatccctgggtgagtttcaccagttttgatttaaacgtggccaatatggacaacttcttcgcccccgttttcaccatgggcaaatattatacgcaaggcgacaaggtgctgatgccgctggcgattcaggttcatcatgccgtttgtgatggcttccatgtcggcagaatgcttaatgaattacaacagtactgcgatgagtggcagggcggggcgtaaagatctggatccggcttactaaaagccagataacagtatgcgtatttgcgcgctgatttttgcggtataagaatatatactgatatgtatacccgaagtatgtcaaaaagaggtatgctatgaagcagcgtattacagtgacagttgacagcgacagctatcagttgctcaaggcatatatgatgtcaatatctccggtctggtaagcacaaccatgcagaatgaagcccgtcgtctgcgtgccgaacgctggaaagcggaaaatcaggaagggatggctgaggtcgcccggtttattgaaatgaacggctcttttgctgacgagaacaggggctggtgaaatgcagtttaaggtttacacctataaaagagagagccgttatcgtctgtttgtggatgtacagagtgatattattgacacgcccgggcgacggatggtgatccccctggccagtgcacgtctgctgtcagataaagtctcccgtgaactttacccggtggtgcatatcggggatgaaagctggcgcatgatgaccaccgatatggccagtgtgccggtctccgttatcggggaagaagtggctgatctcagccaccgcgaaaatgacatcaaaaacgccattaacctgatgttctggggaatataaatgtcaggctcccttatacacagccagtctgcaggtcgaccatagtgactggatatgttgtgttttacagtattatgtagtctgttttttatgcaaaatctaatttaatatattgatatttatatcattttacgtttctcgttcagctttcttgtacaaagtggttggtaagcctatccctaaccctctcctcggtctcgattctacgtagtaatgagctagcagtctcgaggttaacgaattccgccccccccctaacgttactggccgaagccgcttggaataaggccggtgtgcgcttgtctatatgttattttccaccatattgccgtcttttggcaatgtgagggcccggaaacctggccctgtcttcttgacgagcattcctaggggtctttcccctctcgccaaaggaatgcaaggtctgttgaatgtcgtgaaggaagcagttcctctggaagcttcttgaagacaaacaacgtctgtagcgaccctttgcaggcagcggaaccccccacctggcgacaggtgcccctgcggccaaaagccacgtgtataagatacacctgcaaaggcggcacaaccccagtgccacgttgtgagttggatagttgtggaaagagtcaaatggctctcctcaagcgtattcaacaaggggctgaaggatgcccagaaggtaccccattgtatgggatctgatctggggcctcggtgcacatgctttacatgtgtttagtcgaggttaaaaaaacgtctaggccccccgaaccacggggacgtggttttcctttgaaaaacacgataataccatggtgagcaagggcgaggaggataacatggccatcatcaaggagttcatgcgcttcaaggtgcacatggagggctccgtgaacggccacgagttcgagatcgagggcgagggcgagggccgcccctacgagggcacccagaccgccaagctgaaggtgaccaagggtggccccctgcccttcgcctgggacatcctgtcccctcagttcatgtacggctccaaggcctacgtgaagcaccccgccgacatccccgactacttgaagctgtccttccccgagggcttcaagtgggagcgcgtgatgaacttcgaggacggcggcgtggtgaccgtgacccaggactcctccctgcaggacggcgagttcatctacaaggtgaagctgcgcggcaccaacttcccctccgacggccccgtaatgcagaagaagaccatgggctgggaggcctcctccgagcggatgtaccccgaggacggcgccctgaagggcgagatcaagcagaggctgaagctgaaggacggcggccactacgacgctgaggtcaagaccacctacaaggccaagaagcccgtgcagctgcccggcgcctacaacgtcaacatcaagttggacatcacctcccacaacgaggactacaccatcgtggaacagtacgaacgcgccgagggccgccactccaccggcggcatggacgagctgtacaagtaacaccggtggcgcgttaagtcgacaatcaacctctggattacaaaatttgtgaaagattgactggtattcttaactatgttgctccttttacgctatgtggatacgctgctttaatgcctttgtatcatgctattgcttcccgtatggctttcattttctcctccttgtataaatcctggttgctgtctctttatgaggagttgtggcccgttgtcaggcaacgtggcgtggtgtgcactgtgtttgctgacgcaacccccactggttggggcattgccaccacctgtcagctcctttccgggactttcgctttccccctccctattgccacggcggaactcatcgccgcctgccttgcccgctgctggacaggggctcggctgttgggcactgacaattccgtggtgttgtcggggaaatcatcgtcctttccttggctgctcgcctgtgttgccacctggattctgcgcgggacgtccttctgctacgtcccttcggccctcaatccagcggaccttccttcccgcggcctgctgccggctctgcggcctcttccgcgtcttcgccttcgccctcagacgagtcggatctccctttgggccgcctccccgcgtcgactttaagaccaatgacttacaaggcagctgtagatcttagccactttttaaaagaaaaggggggactggaagggctaattcactcccaacgaagacaagatctgctttttgcttgtactgggtctctctggttagaccagatctgagcctgggagctctctggctaactagggaacccactgcttaagcctcaataaagcttgccttgagtgcttcaagtagtgtgtgcccgtctgttgtgtgactctggtaactagagatccctcagacccttttagtcagtgtggaaaatctctagcagtacgtatagtagttcatgtcatcttattattcagtatttataacttgcaaagaaatgaatatcagagagtgagaggaacttgtttattgcagcttataatggttacaaataaagcaatagcatcacaaatttcacaaataaagcatttttttcactgcattctagttgtggtttgtccaaactcatcaatgtatcttatcatgtctggctctagctatcccgcccctaactccgcccatcccgcccctaactccgcccagttccgcccattctccgccccatggctgactaattttttttatttatgcagaggccgaggccgcctcggcctctgagctattccagaagtagtgaggaggcttttttggaggcctagggacgtacccaattcgccctatagtgagtcgtattacgcgcgctcactggccgtcgttttacaacgtcgtgactgggaaaaccctggcgttacccaacttaatcgccttgcagcacatccccctttcgccagctggcgtaatagcgaagaggcccgcaccgatcgcccttcccaacagttgcgcagcctgaatggcgaatgggacgcgccctgtagcggcgcattaagcgcggcgggtgtggtggttacgcgcagcgtgaccgctacacttgccagcgccctagcgcccgctcctttcgctttcttcccttcctttctcgccacgttcgccggctttccccgtcaagctctaaatcgggggctccctttagggttccgatttagtgctttacggcacctcgaccccaaaaaacttgattagggtgatggttcacgtagtgggccatcgccctgatagacggtttttcgccctttgacgttggagtccacgttctttaatagtggactcttgttccaaactggaacaacactcaaccctatctcggtctattcttttgatttataagggattttgccgatttcggcctattggttaaaaaatgagctgatttaacaaaaatttaacgcgaattttaacaaaatattaacgcttacaatttaggtggcacttttcggggaaatgtgcgcggaacccctatttgtttatttttctaaatacattcaaatatgtatccgctcatgagacaataaccctgataaatgcttcaataatattgaaaaaggaagagtatgagtattcaacatttccgtgtcgcccttattcccttttttgcggcattttgccttcctgtttttgctcacccagaaacgctggtgaaagtaaaagatgctgaagatcagttgggtgcacgagtgggttacatcgaactggatctcaacagcggtaagatccttgagagttttcgccccgaagaacgttttccaatgatgagcacttttaaagttctgctatgtggcgcggtattatcccgtattgacgccgggcaagagcaactcggtcgccgcatacactattctcagaatgacttggttgagtactcaccagtcacagaaaagcatcttacggatggcatgacagtaagagaattatgcagtgctgccataaccatgagtgataacactgcggccaacttacttctgacaacgatcggaggaccgaaggagctaaccgcttttttgcacaacatgggggatcatgtaactcgccttgatcgttgggaaccggagctgaatgaagccataccaaacgacgagcgtgacaccacgatgcctgtagcaatggcaacaacgttgcgcaaactattaactggcgaactacttactctagcttcccggcaacaattaatagactggatggaggcggataaagttgcaggaccacttctgcgctcggcccttccggctggctggtttattgctgataaatctggagccggtgagcgtgggtctcgcggtatcattgcagcactggggccagatggtaagccctcccgtatcgtagttatctacacgacggggagtcaggcaactatggatgaacgaaatagacagatcgctgagataggtgcctcactgattaagcattggtaactgtcagaccaagtttactcatatatactttagattgatttaaaacttcatttttaatttaaaaggatctaggtgaagatcctttttgataatctcatgaccaaaatcccttaacgtgagttttcgttccactgagcgtcagaccccgtagaaaagatcaaaggatcttcttgagatcctttttttctgcgcgtaatctgctgcttgcaaacaaaaaaaccaccgctaccagcggtggtttgtttgccggatcaagagctaccaactctttttccgaaggtaactggcttcagcagagcgcagataccaaatactgttcttctagtgtagccgtagttaggccaccacttcaagaactctgtagcaccgcctacatacctcgctctgctaatcctgttaccagtggctgctgccagtggcgataagtcgtgtcttaccgggttggactcaagacgatagttaccggataaggcgcagcggtcgggctgaacggggggttcgtgcacacagcccagcttggagcgaacgacctacaccgaactgagatacctacagcgtgagctatgagaaagcgccacgcttcccgaagggagaaaggcggacaggtatccggtaagcggcagggtcggaacaggagagcgcacgagggagcttccagggggaaacgcctggtatctttatagtcctgtcgggtttcgccacctctgacttgagcgtcgatttttgtgatgctcgtcaggggggcggagcctatggaaaaacgccagcaacgcggcctttttacggttcctggccttttgctggccttttgctcacatgttctttcctgcgttatcccctgattctgtggataaccgtattaccgcctttgagtgagctgataccgctcgccgcagccgaacgaccgagcgcagcgagtcagtgagcgaggaagcggaagagcgcccaatacgcaaaccgcctctccccgcgcgttggccgattcattaatgcagctggcacgacaggtttcccgactggaaagcgggcagtgagcgcaacgcaattaatgtgagttagctcactcattaggcaccccaggctttacactttatgcttccggctcgtatgttgtgtggaattgtgagcggataacaatttcacacaggaaacagctatgaccatgattacgccaagcgcgcaattaaccctcactaaagggaacaaaagctggagctgcaagcttaatgtagtcttatgcaatactcttgtagtcttgcaacatggtaacgatgagttagcaacatgccttacaaggagagaaaaagcaccgtgcatgccgattggtggaagtaaggtggtacgatcgtgccttattaggaaggcaacagacgggtctgacatggattggacgaaccactgaattgccgcattgcagagatattgtatttaagtgcctagctcgatacataaacgggtctctctggttagaccagatctgagcctgggagctctctggctaactagggaacccactgcttaagcctcaataaagcttgccttgagtgcttcaagtagtgtgtgcccgtctgttgtgtgactctggtaactagagatccctcagacccttttagtcagtgtggaaaatctctagcagtggcgcccgaacagggacttgaaagcgaaagggaaaccagaggagctctctcgacgcaggactcggcttgctgaagcgcgcacggcaagaggcgaggggcggcgactggtgagtacgccaaaaattttgactagcggaggctagaaggagagagatgggtgcgagagcgtcagtattaagcgggggagaattagatcgcgatgggaaaaaattcggttaaggccagggggaaagaaaaaatataaattaaaacatatagtatgggcaagcagggagctagaacgattcgcagttaatcctggcctgttagaaacatcagaaggctgtagacaaatactgggacagctacaaccatcccttcagacaggatcagaagaacttagatcattatataatacagtagcaaccctctattgtgtgcatcaaaggatagagataaaagacaccaaggaagctttagacaagatagaggaagagcaaaacaaaagtaagaccaccgcacagcaagcggccgctgatcttcagacctggaggaggagatatgagggacaattggagaagtgaattatataaatataaagtagtaaaaattgaaccattaggagtagcacccaccaaggcaaagagaagagtggtgcagagagaaaaaagagcagtgggaataggagctttgttccttgggttcttgggagcagcaggaagcactatgggcgcagcgtcaatgacgctgacggtacaggccagacaattattgtctggtatagtgcagcagcagaacaatttgctgagggctattgaggcgcaacagcatctgttgcaactcacagtctggggcatcaagcagctccaggcaagaatcctggctgtggaaagatacctaaaggatcaacagctcctggggatttggggttgctctggaaaactcatttgcaccactgctgtgccttggaatgctagttggagtaataaatctctggaacagatttggaatcacacgacctggatggagtgggacagagaaattaacaattacacaagcttaatacactccttaattgaagaatcgcaaaaccagcaagaaaagaatgaacaagaattattggaattagataaatgggcaagtttgtggaattggtttaacataacaaattggctgtggtatataaaattattcataatgatagtaggaggcttggtaggtttaagaatagtttttgctgtactttctatagtgaatagagttaggcagggatattcaccattatcgtttcagacccacctcccaaccccgaggggacccttgcgccttttccaaggcagccctgggtttgcgcagggacgcggctgctctgggcgtggttccgggaaacgcagcggcgccgaccctgggtctcgcacattcttcacgtccgttcgcagcgtcacccggatcttcgccgctacccttgtgggccccccggcgacgcttcctgctccgcccctaagtcgggaaggttccttgcggttcgcggcgtgccggacgtgacaaacggaagccgcacgtctcactagtaccctcgcagacggacagcgccagggagcaatggcagcgcgccgaccgcgatgggctgtggccaatagcggctgctcagcagggcgcgccgagagcagcggccgggaaggggcggtgcgggaggcggggtgtggggcggtagtgtgggccctgttcctgcccgcgcggtgttccgcattctgcaagcctccggagcgcacgtcggcagtcggctccctcgttgaccgaatcaccgacctctctccccagggggtacccagctgtctagagaattctagatcttgagacaaatggcagtattcatccacaattttaaaagaaaaggggggattggggggtacagtgcaggggaaagaatagtagacataatagcaacagacatacaaactaaagaattacaaaaacaaattacaaaaattcaaaattttcgggtttattacagggacagcagagatccactttggcgccggctcgaggggg

SEQ ID NO: 189 - DNA, 9669 bp, Artificial Sequence
  Synthetic Polynucleotide
cccggggttattaatagtaatcaattacggggtcattagttcatagcccatatatggagttccgcgttacataacttacggtaaatggcccgcctggctgaccgcccaacgacccccgcccattgacgtcaataatgacgtatgttcccatagtaacgccaatagggactttccattgacgtcaatgggtggagtatttacggtaaactgcccacttggcagtacatcaagtgtatcatatgccaagtacgccccctattgacgtcaatgacggtaaatggcccgcctggcattatgcccagtacatgaccttatgggactttcctacttggcagtacatctacgtattagtcatcgctattaccatggtgatgcggttttggcagtacatcaatgggcgtggatagcggtttgactcacggggatttccaagtctccaccccattgacgtcaatgggagtttgttttggcaccaaaatcaacgggactttccaaaatgtcgtaacaactccgccccattgacgcaaatgggcggtaggcgtgtacggtgggaggtctatataagcagagctctctggctaactgtcgggatcaacaagtttgtacaaaaaagcaggctccgaattcaccggtgccaccatgaaaaagcctgaactcaccgcgacgtctgtcgagaagtttctgatcgaaaagttcgacagcgtctccgacctgatgcagctctcggagggcgaagaatctcgtgctttcagcttcgatgtaggagggcgtggatatgtcctgcgggtaaatagctgcgccgatggtttctacaaagatcgttatgtttatcggcactttgcatcggccgcgctcccgattccggaagtgcttgacattggggaatttagcgagagcctgacctattgcatctcccgccgtgcacagggtgtcacgttgcaagacctgcctgaaaccgaactgcccgctgttctgcagccggtcgcggaggccatggatgcgatcgctgcggccgatcttagccagacgagcgggttcggcccattcggaccgcaaggaatcggtcaatacactacatggcgtgatttcatatgcgcgattgctgatccccatgtgtatcactggcaaactgtgatggacgacaccgtcagtgcgtccgtcgcgcaggctctcgatgagctgatgctttgggccgaggactgccccgaagtccggcacctcgtgcacgcggatttcggctccaacaatgtcctgacggacaatggccgcataacagcggtcattgactggagcgaggcgatgttcggggattcccaatacgaggtcgccaacatcttcttctggaggccgtggttggcttgtatggagcagcagacgcgctacttcgagcggaggcatccggagcttgcaggatcgccgcggctccgggcgtatatgctccgcattggtcttgaccaactctatcagagcttggttgacggcaatttcgatgatgcagcttgggcgcagggtcgatgcgacgcaatcgtccgatccggagccgggactgtcgggcgtacacaaatcgcccgcagaagcgcggccgtctggaccgatggctgtgtagaagtactcgccgatagtggaaaccgacgccccagcactcgtccgagggcaaaggaatagttaattaagaattcgacccagctttcttgtacaaagtggttggtaagcctatccctaaccctctcctcggtctcgattctacgtagtaatgagctagcagtctcgaggttaacgaattccgccccccccctaacgttactggccgaagccgcttggaataaggccggtgtgcgcttgtctatatgttattttccaccatattgccgtcttttggcaatgtgagggcccggaaacctggccctgtcttcttgacgagcattcctaggggtctttcccctctcgccaaaggaatgcaaggtctgttgaatgtcgtgaaggaagcagttcctctggaagcttcttgaagacaaacaacgtctgtagcgaccctttgcaggcagcggaaccccccacctggcgacaggtgcccctgcggccaaaagccacgtgtataagatacacctgcaaaggcggcacaaccccagtgccacgttgtgagttggatagttgtggaaagagtcaaatggctctcctcaagcgtattcaacaaggggctgaaggatgcccagaaggtaccccattgtatgggatctgatctggggcctcggtgcacatgctttacatgtgtttagtcgaggttaaaaaaacgtctaggccccccgaaccacggggacgtggttttcctttgaaaaacacgataataccatggccatgagcgagctgattaaggagaacatgcacatgaagctgtacatggagggcaccgtggacaaccatcacttcaagtgcacatccgagggcgaaggcaagccctacgagggcacccagaccatgagaatcaaggtggtcgagggcggccctctccccttcgccttcgacatcctggctactagcttcctctacggcagcaagaccttcatcaaccacacccagggcatccccgacttcttcaagcagtccttccctgagggcttcacatgggagagagtcaccacatacgaagacgggggcgtgctgaccgctacccaggacaccagcctccaggacggctgcctcatctacaacgtcaagatcagaggggtgaacttcacatccaacggccctgtgatgcagaagaaaacactcggctgggaggccttcaccgagacgctgtaccccgctgacggcggcctggaaggcagaaacgacatggccctgaagctcgtgggcgggagccatctgatcgcaaacatcaagaccacatatagatccaagaaacccgctaagaacctcaagatgcctggcgtctactatgtggactacagactggaaagaatcaaggaggccaacaacgagacctacgtcgagcagcacgaggtggcagtggccagatactgcgacctccctagcaaactggggcacaagcttaattaacaccggtggcgcgttaagtcgacaatcaacctctggattacaaaatttgtgaaagattgactggtattcttaactatgttgctccttttacgctatgtggatacgctgctttaatgcctttgtatcatgctattgcttcccgtatggctttcattttctcctccttgtataaatcctggttgctgtctctttatgaggagttgtggcccgttgtcaggcaacgtggcgtggtgtgcactgtgtttgctgacgcaacccccactggttggggcattgccaccacctgtcagctcctttccgggactttcgctttccccctccctattgccacggcggaactcatcgccgcctgccttgcccgctgctggacaggggctcggctgttgggcactgacaattccgtggtgttgtcggggaaatcatcgtcctttccttggctgctcgcctgtgttgccacctggattctgcgcgggacgtccttctgctacgtcccttcggccctcaatccagcggaccttccttcccgcggcctgctgccggctctgcggcctcttccgcgtcttcgccttcgccctcagacgagtcggatctccctttgggccgcctccccgcgtcgactttaagaccaatgacttacaaggcagctgtagatcttagccactttttaaaagaaaaggggggactggaagggctaattcactcccaacgaagacaagatctgctttttgcttgtactgggtctctctggttagaccagatctgagcctgggagctctctggctaactagggaacccactgcttaagcctcaataaagcttgccttgagtgcttcaagtagtgtgtgcccgtctgttgtgtgactctggtaactagagatccctcagacccttttagtcagtgtggaaaatctctagcagtacgtatagtagttcatgtcatcttattattcagtatttataacttgcaaagaaatgaatatcagagagtgagaggaacttgtttattgcagcttataatggttacaaataaagcaatagcatcacaaatttcacaaataaagcatttttttcactgcattctagttgtggtttgtccaaactcatcaatgtatcttatcatgtctggctctagctatcccgcccctaactccgcccatcccgcccctaactccgcccagttccgcccattctccgccccatggctgactaattttttttatttatgcagaggccgaggccgcctcggcctctgagctattccagaagtagtgaggaggcttttttggaggcctagggacgtacccaattcgccctatagtgagtcgtattacgcgcgctcactggccgtcgttttacaacgtcgtgactgggaaaaccctggcgttacccaacttaatcgccttgcagcacatccccctttcgccagctggcgtaatagcgaagaggcccgcaccgatcgcccttcccaacagttgcgcagcctgaatggcgaatgggacgcgccctgtagcggcgcattaagcgcggcgggtgtggtggttacgcgcagcgtgaccgctacacttgccagcgccctagcgcccgctcctttcgctttcttcccttcctttctcgccacgttcgccggctttccccgtcaagctctaaatcgggggctccctttagggttccgatttagtgctttacggcacctcgaccccaaaaaacttgattagggtgatggttcacgtagtgggccatcgccctgatagacggtttttcgccctttgacgttggagtccacgttctttaatagtggactcttgttccaaactggaacaacactcaaccctatctcggtctattcttttgatttataagggattttgccgatttcggcctattggttaaaaaatgagctgatttaacaaaaatttaacgcgaattttaacaaaatattaacgcttacaatttaggtggcacttttcggggaaatgtgcgcggaacccctatttgtttatttttctaaatacattcaaatatgtatccgctcatgagacaataaccctgataaatgcttcaataatattgaaaaaggaagagtatgagtattcaacatttccgtgtcgcccttattcccttttttgcggcattttgccttcctgtttttgctcacccagaaacgctggtgaaagtaaaagatgctgaagatcagttgggtgcacgagtgggttacatcgaactggatctcaacagcggtaagatccttgagagttttcgccccgaagaacgttttccaatgatgagcacttttaaagttctgctatgtggcgcggtattatcccgtattgacgccgggcaagagcaactcggtcgccgcatacactattctcagaatgacttggttgagtactcaccagtcacagaaaagcatcttacggatggcatgacagtaagagaattatgcagtgctgccataaccatgagtgataacactgcggccaacttacttctgacaacgatcggaggaccgaaggagctaaccgcttttttgcacaacatgggggatcatgtaactcgccttgatcgttgggaaccggagctgaatgaagccataccaaacgacgagcgtgacaccacgatgcctgtagcaatggcaacaacgttgcgcaaactattaactggcgaactacttactctagcttcccggcaacaattaatagactggatggaggcggataaagttgcaggaccacttctgcgctcggcccttccggctggctggtttattgctgataaatctggagccggtgagcgtgggtctcgcggtatcattgcagcactggggccagatggtaagccctcccgtatcgtagttatctacacgacggggagtcaggcaactatggatgaacgaaatagacagatcgctgagataggtgcctcactgattaagcattggtaactgtcagaccaagtttactcatatatactttagattgatttaaaacttcatttttaatttaaaaggatctaggtgaagatcctttttgataatctcatgaccaaaatcccttaacgtgagttttcgttccactgagcgtcagaccccgtagaaaagatcaaaggatcttcttgagatcctttttttctgcgcgtaatctgctgcttgcaaacaaaaaaaccaccgctaccagcggtggtttgtttgccggatcaagagctaccaactctttttccgaaggtaactggcttcagcagagcgcagataccaaatactgttcttctagtgtagccgtagttaggccaccacttcaagaactctgtagcaccgcctacatacctcgctctgctaatcctgttaccagtggctgctgccagtggcgataagtcgtgtcttaccgggttggactcaagacgatagttaccggataaggcgcagcggtcgggctgaacggggggttcgtgcacacagcccagcttggagcgaacgacctacaccgaactgagatacctacagcgtgagctatgagaaagcgccacgcttcccgaagggagaaaggcggacaggtatccggtaagcggcagggtcggaacaggagagcgcacgagggagcttccagggggaaacgcctggtatctttatagtcctgtcgggtttcgccacctctgacttgagcgtcgatttttgtgatgctcgtcaggggggcggagcctatggaaaaacgccagcaacgcggcctttttacggttcctggccttttgctggccttttgctcacatgttctttcctgcgttatcccctgattctgtggataaccgtattaccgcctttgagtgagctgataccgctcgccgcagccgaacgaccgagcgcagcgagtcagtgagcgaggaagcggaagagcgcccaatacgcaaaccgcctctccccgcgcgttggccgattcattaatgcagctggcacgacaggtttcccgactggaaagcgggcagtgagcgcaacgcaattaatgtgagttagctcactcattaggcaccccaggctttacactttatgcttccggctcgtatgttgtgtggaattgtgagcggataacaatttcacacaggaaacagctatgaccatgattacgccaagcgcgcaattaaccctcactaaagggaacaaaagctggagctgcaagcttaatgtagtcttatgcaatactcttgtagtcttgcaacatggtaacgatgagttagcaacatgccttacaaggagagaaaaagcaccgtgcatgccgattggtggaagtaaggtggtacgatcgtgccttattaggaaggcaacagacgggtctgacatggattggacgaaccactgaattgccgcattgcagagatattgtatttaagtgcctagctcgatacataaacgggtctctctggttagaccagatctgagcctgggagctctctggctaactagggaacccactgcttaagcctcaataaagcttgccttgagtgcttcaagtagtgtgtgcccgtctgttgtgtgactctggtaactagagatccctcagacccttttagtcagtgtggaaaatctctagcagtggcgcccgaacagggacttgaaagcgaaagggaaaccagaggagctctctcgacgcaggactcggcttgctgaagcgcgcacggcaagaggcgaggggcggcgactggtgagtacgccaaaaattttgactagcggaggctagaaggagagagatgggtgcgagagcgtcagtattaagcgggggagaattagatcgcgatgggaaaaaattcggttaaggccagggggaaagaaaaaatataaattaaaacatatagtatgggcaagcagggagctagaacgattcgcagttaatcctggcctgttagaaacatcagaaggctgtagacaaatactgggacagctacaaccatcccttcagacaggatcagaagaacttagatcattatataatacagtagcaaccctctattgtgtgcatcaaaggatagagataaaagacaccaaggaagctttagacaagatagaggaagagcaaaacaaaagtaagaccaccgcacagcaagcggccgctgatcttcagacctggaggaggagatatgagggacaattggagaagtgaattatataaatataaagtagtaaaaattgaaccattaggagtagcacccaccaaggcaaagagaagagtggtgcagagagaaaaaagagcagtgggaataggagctttgttccttgggttcttgggagcagcaggaagcactatgggcgcagcgtcaatgacgctgacggtacaggccagacaattattgtctggtatagtgcagcagcagaacaatttgctgagggctattgaggcgcaacagcatctgttgcaactcacagtctggggcatcaagcagctccaggcaagaatcctggctgtggaaagatacctaaaggatcaacagctcctggggatttggggttgctctggaaaactcatttgcaccactgctgtgccttggaatgctagttggagtaataaatctctggaacagatttggaatcacacgacctggatggagtgggacagagaaattaacaattacacaagcttaatacactccttaattgaagaatcgcaaaaccagcaagaaaagaatgaacaagaattattggaattagataaatgggcaagtttgtggaattggtttaacataacaaattggctgtggtatataaaattattcataatgatagtaggaggcttggtaggtttaagaatagtttttgctgtactttctatagtgaatagagttaggcagggatattcaccattatcgtttcagacccacctcccaaccccgaggggacccttgcgccttttccaaggcagccctgggtttgcgcagggacgcggctgctctgggcgtggttccgggaaacgcagcggcgccgaccctgggtctcgcacattcttcacgtccgttcgcagcgtcacccggatcttcgccgctacccttgtgggccccccggcgacgcttcctgctccgcccctaagtcgggaaggttccttgcggttcgcggcgtgccggacgtgacaaacggaagccgcacgtctcactagtaccctcgcagacggacagcgccagggagcaatggcagcgcgccgaccgcgatgggctgtggccaatagcggctgctcagcagggcgcgccgagagcagcggccgggaaggggcggtgcgggaggcggggtgtggggcggtagtgtgggccctgttcctgcccgcgcggtgttccgcattctgcaagcctccggagcgcacgtcggcagtcggctccctcgttgaccgaatcaccgacctctctccccagggggtacccagctgtctagagaattctagatcttgagacaaatggcagtattcatccacaattttaaaagaaaaggggggattggggggtacagtgcaggggaaagaatagtagacataatagcaacagacatacaaactaaagaattacaaaaacaaattacaaaaattcaaaattttcgggtttattacagggacagcagagatccactttggcgccggctcgaggggg

SEQ ID NO: 190 - DNA, 9672 bp, Artificial Sequence
  Synthetic Polynucleotide
cccggggttattaatagtaatcaattacggggtcattagttcatagcccatatatggagttccgcgttacataacttacggtaaatggcccgcctggctgaccgcccaacgacccccgcccattgacgtcaataatgacgtatgttcccatagtaacgccaatagggactttccattgacgtcaatgggtggagtatttacggtaaactgcccacttggcagtacatcaagtgtatcatatgccaagtacgccccctattgacgtcaatgacggtaaatggcccgcctggcattatgcccagtacatgaccttatgggactttcctacttggcagtacatctacgtattagtcatcgctattaccatggtgatgcggttttggcagtacatcaatgggcgtggatagcggtttgactcacggggatttccaagtctccaccccattgacgtcaatgggagtttgttttggcaccaaaatcaacgggactttccaaaatgtcgtaacaactccgccccattgacgcaaatgggcggtaggcgtgtacggtgggaggtctatataagcagagctctctggctaactgtcgggatcaacaagtttgtacaaaaaagcaggctccgaattcaccggtgccaccatgaaaaagcctgaactcaccgcgacgtctgtcgagaagtttctgatcgaaaagttcgacagcgtctccgacctgatgcagctctcggagggcgaagaatctcgtgctttcagcttcgatgtaggagggcgtggatatgtcctgcgggtaaatagctgcgccgatggtttctacaaagatcgttatgtttatcggcactttgcatcggccgcgctcccgattccggaagtgcttgacattggggaatttagcgagagcctgacctattgcatctcccgccgtgcacagggtgtcacgttgcaagacctgcctgaaaccgaactgcccgctgttctgcagccggtcgcggaggccatggatgcgatcgctgcggccgatcttagccagacgagcgggttcggcccattcggaccgcaaggaatcggtcaatacactacatggcgtgatttcatatgcgcgattgctgatccccatgtgtatcactggcaaactgtgatggacgacaccgtcagtgcgtccgtcgcgcaggctctcgatgagctgatgctttgggccgaggactgccccgaagtccggcacctcgtgcacgcggatttcggctccaacaatgtcctgacggacaatggccgcataacagcggtcattgactggagcgaggcgatgttcggggattcccaatacgaggtcgccaacatcttcttctggaggccgtggttggcttgtatggagcagcagacgcgctacttcgagcggaggcatccggagcttgcaggatcgccgcggctccgggcgtatatgctccgcattggtcttgaccaactctatcagagcttggttgacggcaatttcgatgatgcagcttgggcgcagggtcgatgcgacgcaatcgtccgatccggagccgggactgtcgggcgtacacaaatcgcccgcagaagcgcggccgtctggaccgatggctgtgtagaagtactcgccgatagtggaaaccgacgccccagcactcgtccgagggcaaaggaatagttaattaagaattcgacccagctttcttgtacaaagtggttggtaagcctatccctaaccctctcctcggtctcgattctacgtagtaatgagctagcagtctcgaggttaacgaattccgccccccccctaacgttactggccgaagccgcttggaataaggccggtgtgcgcttgtctatatgttattttccaccatattgccgtcttttggcaatgtgagggcccggaaacctggccctgtcttcttgacgagcattcctaggggtctttcccctctcgccaaaggaatgcaaggtctgttgaatgtcgtgaaggaagcagttcctctggaagcttcttgaagacaaacaacgtctgtagcgaccctttgcaggcagcggaaccccccacctggcgacaggtgcccctgcggccaaaagccacgtgtataagatacacctgcaaaggcggcacaaccccagtgccacgttgtgagttggatagttgtggaaagagtcaaatggctctcctcaagcgtattcaacaaggggctgaaggatgcccagaaggtaccccattgtatgggatctgatctggggcctcggtgcacatgctttacatgtgtttagtcgaggttaaaaaaacgtctaggccccccgaaccacggggacgtggttttcctttgaaaaacacgataataccatggtgagcaagggcgaggaggataacatggccatcatcaaggagttcatgcgcttcaaggtgcacatggagggctccgtgaacggccacgagttcgagatcgagggcgagggcgagggccgcccctacgagggcacccagaccgccaagctgaaggtgaccaagggtggccccctgcccttcgcctgggacatcctgtcccctcagttcatgtacggctccaaggcctacgtgaagcaccccgccgacatccccgactacttgaagctgtccttccccgagggcttcaagtgggagcgcgtgatgaacttcgaggacggcggcgtggtgaccgtgacccaggactcctccctgcaggacggcgagttcatctacaaggtgaagctgcgcggcaccaacttcccctccgacggccccgtaatgcagaagaagaccatgggctgggaggcctcctccgagcggatgtaccccgaggacggcgccctgaagggcgagatcaagcagaggctgaagctgaaggacggcggccactacgacgctgaggtcaagaccacctacaaggccaagaagcccgtgcagctgcccggcgcctacaacgtcaacatcaagttggacatcacctcccacaacgaggactacaccatcgtggaacagtacgaacgcgccgagggccgccactccaccggcggcatggacgagctgtacaagtaacaccggtggcgcgttaagtcgacaatcaacctctggattacaaaatttgtgaaagattgactggtattcttaactatgttgctccttttacgctatgtggatacgctgctttaatgcctttgtatcatgctattgcttcccgtatggctttcattttctcctccttgtataaatcctggttgctgtctctttatgaggagttgtggcccgttgtcaggcaacgtggcgtggtgtgcactgtgtttgctgacgcaacccccactggttggggcattgccaccacctgtcagctcctttccgggactttcgctttccccctccctattgccacggcggaactcatcgccgcctgccttgcccgctgctggacaggggctcggctgttgggcactgacaattccgtggtgttgtcggggaaatcatcgtcctttccttggctgctcgcctgtgttgccacctggattctgcgcgggacgtccttctgctacgtcccttcggccctcaatccagcggaccttccttcccgcggcctgctgccggctctgcggcctcttccgcgtcttcgccttcgccctcagacgagtcggatctccctttgggccgcctccccgcgtcgactttaagaccaatgacttacaaggcagctgtagatcttagccactttttaaaagaaaaggggggactggaagggctaattcactcccaacgaagacaagatctgctttttgcttgtactgggtctctctggttagaccagatctgagcctgggagctctctggctaactagggaacccactgcttaagcctcaataaagcttgccttgagtgcttcaagtagtgtgtgcccgtctgttgtgtgactctggtaactagagatccctcagacccttttagtcagtgtggaaaatctctagcagtacgtatagtagttcatgtcatcttattattcagtatttataacttgcaaagaaatgaatatcagagagtgagaggaacttgtttattgcagcttataatggttacaaataaagcaatagcatcacaaatttcacaaataaagcatttttttcactgcattctagttgtggtttgtccaaactcatcaatgtatcttatcatgtctggctctagctatcccgcccctaactccgcccatcccgcccctaactccgcccagttccgcccattctccgccccatggctgactaattttttttatttatgcagaggccgaggccgcctcggcctctgagctattccagaagtagtgaggaggcttttttggaggcctagggacgtacccaattcgccctatagtgagtcgtattacgcgcgctcactggccgtcgttttacaacgtcgtgactgggaaaaccctggcgttacccaacttaatcgccttgcagcacatccccctttcgccagctggcgtaatagcgaagaggcccgcaccgatcgcccttcccaacagttgcgcagcctgaatggcgaatgggacgcgccctgtagcggcgcattaagcgcggcgggtgtggtggttacgcgcagcgtgaccgctacacttgccagcgccctagcgcccgctcctttcgctttcttcccttcctttctcgccacgttcgccggctttccccgtcaagctctaaatcgggggctccctttagggttccgatttagtgctttacggcacctcgaccccaaaaaacttgattagggtgatggttcacgtagtgggccatcgccctgatagacggtttttcgccctttgacgttggagtccacgttctttaatagtggactcttgttccaaactggaacaacactcaaccctatctcggtctattcttttgatttataagggattttgccgatttcggcctattggttaaaaaatgagctgatttaacaaaaatttaacgcgaattttaacaaaatattaacgcttacaatttaggtggcacttttcggggaaatgtgcgcggaacccctatttgtttatttttctaaatacattcaaatatgtatccgctcatgagacaataaccctgataaatgcttcaataatattgaaaaaggaagagtatgagtattcaacatttccgtgtcgcccttattcccttttttgcggcattttgccttcctgtttttgctcacccagaaacgctggtgaaagtaaaagatgctgaagatcagttgggtgcacgagtgggttacatcgaactggatctcaacagcggtaagatccttgagagttttcgccccgaagaacgttttccaatgatgagcacttttaaagttctgctatgtggcgcggtattatcccgtattgacgccgggcaagagcaactcggtcgccgcatacactattctcagaatgacttggttgagtactcaccagtcacagaaaagcatcttacggatggcatgacagtaagagaattatgcagtgctgccataaccatgagtgataacactgcggccaacttacttctgacaacgatcggaggaccgaaggagctaaccgcttttttgcacaacatgggggatcatgtaactcgccttgatcgttgggaaccggagctgaatgaagccataccaaacgacgagcgtgacaccacgatgcctgtagcaatggcaacaacgttgcgcaaactattaactggcgaactacttactctagcttcccggcaacaattaatagactggatggaggcggataaagttgcaggaccacttctgcgctcggcccttccggctggctggtttattgctgataaatctggagccggtgagcgtgggtctcgcggtatcattgcagcactggggccagatggtaagccctcccgtatcgtagttatctacacgacggggagtcaggcaactatggatgaacgaaatagacagatcgctgagataggtgcctcactgattaagcattggtaactgtcagaccaagtttactcatatatactttagattgatttaaaacttcatttttaatttaaaaggatctaggtgaagatcctttttgataatctcatgaccaaaatcccttaacgtgagttttcgttccactgagcgtcagaccccgtagaaaagatcaaaggatcttcttgagatcctttttttctgcgcgtaatctgctgcttgcaaacaaaaaaaccaccgctaccagcggtggtttgtttgccggatcaagagctaccaactctttttccgaaggtaactggcttcagcagagcgcagataccaaatactgttcttctagtgtagccgtagttaggccaccacttcaagaactctgtagcaccgcctacatacctcgctctgctaatcctgttaccagtggctgctgccagtggcgataagtcgtgtcttaccgggttggactcaagacgatagttaccggataaggcgcagcggtcgggctgaacggggggttcgtgcacacagcccagcttggagcgaacgacctacaccgaactgagatacctacagcgtgagctatgagaaagcgccacgcttcccgaagggagaaaggcggacaggtatccggtaagcggcagggtcggaacaggagagcgcacgagggagcttccagggggaaacgcctggtatctttatagtcctgtcgggtttcgccacctctgacttgagcgtcgatttttgtgatgctcgtcaggggggcggagcctatggaaaaacgccagcaacgcggcctttttacggttcctggccttttgctggccttttgctcacatgttctttcctgcgttatcccctgattctgtggataaccgtattaccgcctttgagtgagctgataccgctcgccgcagccgaacgaccgagcgcagcgagtcagtgagcgaggaagcggaagagcgcccaatacgcaaaccgcctctccccgcgcgttggccgattcattaatgcagctggcacgacaggtttcccgactggaaagcgggcagtgagcgcaacgcaattaatgtgagttagctcactcattaggcaccccaggctttacactttatgcttccggctcgtatgttgtgtggaattgtgagcggataacaatttcacacaggaaacagctatgaccatgattacgccaagcgcgcaattaaccctcactaaagggaacaaaagctggagctgcaagcttaatgtagtcttatgcaatactcttgtagtcttgcaacatggtaacgatgagttagcaacatgccttacaaggagagaaaaagcaccgtgcatgccgattggtggaagtaaggtggtacgatcgtgccttattaggaaggcaacagacgggtctgacatggattggacgaaccactgaattgccgcattgcagagatattgtatttaagtgcctagctcgatacataaacgggtctctctggttagaccagatctgagcctgggagctctctggctaactagggaacccactgcttaagcctcaataaagcttgccttgagtgcttcaagtagtgtgtgcccgtctgttgtgtgactctggtaactagagatccctcagacccttttagtcagtgtggaaaatctctagcagtggcgcccgaacagggacttgaaagcgaaagggaaaccagaggagctctctcgacgcaggactcggcttgctgaagcgcgcacggcaagaggcgaggggcggcgactggtgagtacgccaaaaattttgactagcggaggctagaaggagagagatgggtgcgagagcgtcagtattaagcgggggagaattagatcgcgatgggaaaaaattcggttaaggccagggggaaagaaaaaatataaattaaaacatatagtatgggcaagcagggagctagaacgattcgcagttaatcctggcctgttagaaacatcagaaggctgtagacaaatactgggacagctacaaccatcccttcagacaggatcagaagaacttagatcattatataatacagtagcaaccctctattgtgtgcatcaaaggatagagataaaagacaccaaggaagctttagacaagatagaggaagagcaaaacaaaagtaagaccaccgcacagcaagcggccgctgatcttcagacctggaggaggagatatgagggacaattggagaagtgaattatataaatataaagtagtaaaaattgaaccattaggagtagcacccaccaaggcaaagagaagagtggtgcagagagaaaaaagagcagtgggaataggagctttgttccttgggttcttgggagcagcaggaagcactatgggcgcagcgtcaatgacgctgacggtacaggccagacaattattgtctggtatagtgcagcagcagaacaatttgctgagggctattgaggcgcaacagcatctgttgcaactcacagtctggggcatcaagcagctccaggcaagaatcctggctgtggaaagatacctaaaggatcaacagctcctggggatttggggttgctctggaaaactcatttgcaccactgctgtgccttggaatgctagttggagtaataaatctctggaacagatttggaatcacacgacctggatggagtgggacagagaaattaacaattacacaagcttaatacactccttaattgaagaatcgcaaaaccagcaagaaaagaatgaacaagaattattggaattagataaatgggcaagtttgtggaattggtttaacataacaaattggctgtggtatataaaattattcataatgatagtaggaggcttggtaggtttaagaatagtttttgctgtactttctatagtgaatagagttaggcagggatattcaccattatcgtttcagacccacctcccaaccccgaggggacccttgcgccttttccaaggcagccctgggtttgcgcagggacgcggctgctctgggcgtggttccgggaaacgcagcggcgccgaccctgggtctcgcacattcttcacgtccgttcgcagcgtcacccggatcttcgccgctacccttgtgggccccccggcgacgcttcctgctccgcccctaagtcgggaaggttccttgcggttcgcggcgtgccggacgtgacaaacggaagccgcacgtctcactagtaccctcgcagacggacagcgccagggagcaatggcagcgcgccgaccgcgatgggctgtggccaatagcggctgctcagcagggcgcgccgagagcagcggccgggaaggggcggtgcgggaggcggggtgtggggcggtagtgtgggccctgttcctgcccgcgcggtgttccgcattctgcaagcctccggagcgcacgtcggcagtcggctccctcgttgaccgaatcaccgacctctctccccagggggtacccagctgtctagagaattctagatcttgagacaaatggcagtattcatccacaattttaaaagaaaaggggggattggggggtacagtgcaggggaaagaatagtagacataatagcaacagacatacaaactaaagaattacaaaaacaaattacaaaaattcaaaattttcgggtttattacagggacagcagagatccactttggcgccggctcgaggggg

SEQ ID NO: 191 - DNA, 9243 bp, Artificial Sequence
  Synthetic Polynucleotide
cccggggttattaatagtaatcaattacggggtcattagttcatagcccatatatggagttccgcgttacataacttacggtaaatggcccgcctggctgaccgcccaacgacccccgcccattgacgtcaataatgacgtatgttcccatagtaacgccaatagggactttccattgacgtcaatgggtggagtatttacggtaaactgcccacttggcagtacatcaagtgtatcatatgccaagtacgccccctattgacgtcaatgacggtaaatggcccgcctggcattatgcccagtacatgaccttatgggactttcctacttggcagtacatctacgtattagtcatcgctattaccatggtgatgcggttttggcagtacatcaatgggcgtggatagcggtttgactcacggggatttccaagtctccaccccattgacgtcaatgggagtttgttttggcaccaaaatcaacgggactttccaaaatgtcgtaacaactccgccccattgacgcaaatgggcggtaggcgtgtacggtgggaggtctatataagcagagctctctggctaactgtcgggatcaacaagtttgtacaaaaaagcaggctccgaattcaccggtgccaccatgaccgagtacaagcccacggtgcgcctcgccacccgcgacgacgtccccagggccgtacgcaccctcgccgccgcgttcgccgactaccccgccacgcgccacaccgtcgatccggaccgccacatcgagcgggtcaccgagctgcaagaactcttcctcacgcgcgtcgggctcgacatcggcaaggtgtgggtcgcggacgacggcgccgcggtggcggtctggaccacgccggagagcgtcgaagcgggggcggtgttcgccgagatcggcccgcgcatggccgagttgagcggttcccggctggccgcgcagcaacagatggaaggcctcctggcgccgcaccggcccaaggagcccgcgtggttcctggccaccgtcggcgtctcgcccgaccaccagggcaagggtctgggcagcgccgtcgtgctccccggagtggaggcggccgagcgcgccggggtgcccgccttcctggagacctccgcgccccgcaacctccccttctacgagcggctcggcttcaccgtcaccgccgacgtcgaggtgcccgaaggaccgcgcacctggtgcatgacccgcaagcccggtgcctgattaattaagaattcgacccagctttcttgtacaaagtggttggtaagcctatccctaaccctctcctcggtctcgattctacgtagtaatgagctagcagtctcgaggttaacgaattccgccccccccctaacgttactggccgaagccgcttggaataaggccggtgtgcgcttgtctatatgttattttccaccatattgccgtcttttggcaatgtgagggcccggaaacctggccctgtcttcttgacgagcattcctaggggtctttcccctctcgccaaaggaatgcaaggtctgttgaatgtcgtgaaggaagcagttcctctggaagcttcttgaagacaaacaacgtctgtagcgaccctttgcaggcagcggaaccccccacctggcgacaggtgcccctgcggccaaaagccacgtgtataagatacacctgcaaaggcggcacaaccccagtgccacgttgtgagttggatagttgtggaaagagtcaaatggctctcctcaagcgtattcaacaaggggctgaaggatgcccagaaggtaccccattgtatgggatctgatctggggcctcggtgcacatgctttacatgtgtttagtcgaggttaaaaaaacgtctaggccccccgaaccacggggacgtggttttcctttgaaaaacacgataataccatggccatgagcgagctgattaaggagaacatgcacatgaagctgtacatggagggcaccgtggacaaccatcacttcaagtgcacatccgagggcgaaggcaagccctacgagggcacccagaccatgagaatcaaggtggtcgagggcggccctctccccttcgccttcgacatcctggctactagcttcctctacggcagcaagaccttcatcaaccacacccagggcatccccgacttcttcaagcagtccttccctgagggcttcacatgggagagagtcaccacatacgaagacgggggcgtgctgaccgctacccaggacaccagcctccaggacggctgcctcatctacaacgtcaagatcagaggggtgaacttcacatccaacggccctgtgatgcagaagaaaacactcggctgggaggccttcaccgagacgctgtaccccgctgacggcggcctggaaggcagaaacgacatggccctgaagctcgtgggcgggagccatctgatcgcaaacatcaagaccacatatagatccaagaaacccgctaagaacctcaagatgcctggcgtctactatgtggactacagactggaaagaatcaaggaggccaacaacgagacctacgtcgagcagcacgaggtggcagtggccagatactgcgacctccctagcaaactggggcacaagcttaattaacaccggtggcgcgttaagtcgacaatcaacctctggattacaaaatttgtgaaagattgactggtattcttaactatgttgctccttttacgctatgtggatacgctgctttaatgcctttgtatcatgctattgcttcccgtatggctttcattttctcctccttgtataaatcctggttgctgtctctttatgaggagttgtggcccgttgtcaggcaacgtggcgtggtgtgcactgtgtttgctgacgcaacccccactggttggggcattgccaccacctgtcagctcctttccgggactttcgctttccccctccctattgccacggcggaactcatcgccgcctgccttgcccgctgctggacaggggctcggctgttgggcactgacaattccgtggtgttgtcggggaaatcatcgtcctttccttggctgctcgcctgtgttgccacctggattctgcgcgggacgtccttctgctacgtcccttcggccctcaatccagcggaccttccttcccgcggcctgctgccggctctgcggcctcttccgcgtcttcgccttcgccctcagacgagtcggatctccctttgggccgcctccccgcgtcgactttaagaccaatgacttacaaggcagctgtagatcttagccactttttaaaagaaaaggggggactggaagggctaattcactcccaacgaagacaagatctgctttttgcttgtactgggtctctctggttagaccagatctgagcctgggagctctctggctaactagggaacccactgcttaagcctcaataaagcttgccttgagtgcttcaagtagtgtgtgcccgtctgttgtgtgactctggtaactagagatccctcagacccttttagtcagtgtggaaaatctctagcagtacgtatagtagttcatgtcatcttattattcagtatttataacttgcaaagaaatgaatatcagagagtgagaggaacttgtttattgcagcttataatggttacaaataaagcaatagcatcacaaatttcacaaataaagcatttttttcactgcattctagttgtggtttgtccaaactcatcaatgtatcttatcatgtctggctctagctatcccgcccctaactccgcccatcccgcccctaactccgcccagttccgcccattctccgccccatggctgactaattttttttatttatgcagaggccgaggccgcctcggcctctgagctattccagaagtagtgaggaggcttttttggaggcctagggacgtacccaattcgccctatagtgagtcgtattacgcgcgctcactggccgtcgttttacaacgtcgtgactgggaaaaccctggcgttacccaacttaatcgccttgcagcacatccccctttcgccagctggcgtaatagcgaagaggcccgcaccgatcgcccttcccaacagttgcgcagcctgaatggcgaatgggacgcgccctgtagcggcgcattaagcgcggcgggtgtggtggttacgcgcagcgtgaccgctacacttgccagcgccctagcgcccgctcctttcgctttcttcccttcctttctcgccacgttcgccggctttccccgtcaagctctaaatcgggggctccctttagggttccgatttagtgctttacggcacctcgaccccaaaaaacttgattagggtgatggttcacgtagtgggccatcgccctgatagacggtttttcgccctttgacgttggagtccacgttctttaatagtggactcttgttccaaactggaacaacactcaaccctatctcggtctattcttttgatttataagggattttgccgatttcggcctattggttaaaaaatgagctgatttaacaaaaatttaacgcgaattttaacaaaatattaacgcttacaatttaggtggcacttttcggggaaatgtgcgcggaacccctatttgtttatttttctaaatacattcaaatatgtatccgctcatgagacaataaccctgataaatgcttcaataatattgaaaaaggaagagtatgagtattcaacatttccgtgtcgcccttattcccttttttgcggcattttgccttcctgtttttgctcacccagaaacgctggtgaaagtaaaagatgctgaagatcagttgggtgcacgagtgggttacatcgaactggatctcaacagcggtaagatccttgagagttttcgccccgaagaacgttttccaatgatgagcacttttaaagttctgctatgtggcgcggtattatcccgtattgacgccgggcaagagcaactcggtcgccgcatacactattctcagaatgacttggttgagtactcaccagtcacagaaaagcatcttacggatggcatgacagtaagagaattatgcagtgctgccataaccatgagtgataacactgcggccaacttacttctgacaacgatcggaggaccgaaggagctaaccgcttttttgcacaacatgggggatcatgtaactcgccttgatcgttgggaaccggagctgaatgaagccataccaaacgacgagcgtgacaccacgatgcctgtagcaatggcaacaacgttgcgcaaactattaactggcgaactacttactctagcttcccggcaacaattaatagactggatggaggcggataaagttgcaggaccacttctgcgctcggcccttccggctggctggtttattgctgataaatctggagccggtgagcgtgggtctcgcggtatcattgcagcactggggccagatggtaagccctcccgtatcgtagttatctacacgacggggagtcaggcaactatggatgaacgaaatagacagatcgctgagataggtgcctcactgattaagcattggtaactgtcagaccaagtttactcatatatactttagattgatttaaaacttcatttttaatttaaaaggatctaggtgaagatcctttttgataatctcatgaccaaaatcccttaacgtgagttttcgttccactgagcgtcagaccccgtagaaaagatcaaaggatcttcttgagatcctttttttctgcgcgtaatctgctgcttgcaaacaaaaaaaccaccgctaccagcggtggtttgtttgccggatcaagagctaccaactctttttccgaaggtaactggcttcagcagagcgcagataccaaatactgttcttctagtgtagccgtagttaggccaccacttcaagaactctgtagcaccgcctacatacctcgctctgctaatcctgttaccagtggctgctgccagtggcgataagtcgtgtcttaccgggttggactcaagacgatagttaccggataaggcgcagcggtcgggctgaacggggggttcgtgcacacagcccagcttggagcgaacgacctacaccgaactgagatacctacagcgtgagctatgagaaagcgccacgcttcccgaagggagaaaggcggacaggtatccggtaagcggcagggtcggaacaggagagcgcacgagggagcttccagggggaaacgcctggtatctttatagtcctgtcgggtttcgccacctctgacttgagcgtcgatttttgtgatgctcgtcaggggggcggagcctatggaaaaacgccagcaacgcggcctttttacggttcctggccttttgctggccttttgctcacatgttctttcctgcgttatcccctgattctgtggataaccgtattaccgcctttgagtgagctgataccgctcgccgcagccgaacgaccgagcgcagcgagtcagtgagcgaggaagcggaagagcgcccaatacgcaaaccgcctctccccgcgcgttggccgattcattaatgcagctggcacgacaggtttcccgactggaaagcgggcagtgagcgcaacgcaattaatgtgagttagctcactcattaggcaccccaggctttacactttatgcttccggctcgtatgttgtgtggaattgtgagcggataacaatttcacacaggaaacagctatgaccatgattacgccaagcgcgcaattaaccctcactaaagggaacaaaagctggagctgcaagcttaatgtagtcttatgcaatactcttgtagtcttgcaacatggtaacgatgagttagcaacatgccttacaaggagagaaaaagcaccgtgcatgccgattggtggaagtaaggtggtacgatcgtgccttattaggaaggcaacagacgggtctgacatggattggacgaaccactgaattgccgcattgcagagatattgtatttaagtgcctagctcgatacataaacgggtctctctggttagaccagatctgagcctgggagctctctggctaactagggaacccactgcttaagcctcaataaagcttgccttgagtgcttcaagtagtgtgtgcccgtctgttgtgtgactctggtaactagagatccctcagacccttttagtcagtgtggaaaatctctagcagtggcgcccgaacagggacttgaaagcgaaagggaaaccagaggagctctctcgacgcaggactcggcttgctgaagcgcgcacggcaagaggcgaggggcggcgactggtgagtacgccaaaaattttgactagcggaggctagaaggagagagatgggtgcgagagcgtcagtattaagcgggggagaattagatcgcgatgggaaaaaattcggttaaggccagggggaaagaaaaaatataaattaaaacatatagtatgggcaagcagggagctagaacgattcgcagttaatcctggcctgttagaaacatcagaaggctgtagacaaatactgggacagctacaaccatcccttcagacaggatcagaagaacttagatcattatataatacagtagcaaccctctattgtgtgcatcaaaggatagagataaaagacaccaaggaagctttagacaagatagaggaagagcaaaacaaaagtaagaccaccgcacagcaagcggccgctgatcttcagacctggaggaggagatatgagggacaattggagaagtgaattatataaatataaagtagtaaaaattgaaccattaggagtagcacccaccaaggcaaagagaagagtggtgcagagagaaaaaagagcagtgggaataggagctttgttccttgggttcttgggagcagcaggaagcactatgggcgcagcgtcaatgacgctgacggtacaggccagacaattattgtctggtatagtgcagcagcagaacaatttgctgagggctattgaggcgcaacagcatctgttgcaactcacagtctggggcatcaagcagctccaggcaagaatcctggctgtggaaagatacctaaaggatcaacagctcctggggatttggggttgctctggaaaactcatttgcaccactgctgtgccttggaatgctagttggagtaataaatctctggaacagatttggaatcacacgacctggatggagtgggacagagaaattaacaattacacaagcttaatacactccttaattgaagaatcgcaaaaccagcaagaaaagaatgaacaagaattattggaattagataaatgggcaagtttgtggaattggtttaacataacaaattggctgtggtatataaaattattcataatgatagtaggaggcttggtaggtttaagaatagtttttgctgtactttctatagtgaatagagttaggcagggatattcaccattatcgtttcagacccacctcccaaccccgaggggacccttgcgccttttccaaggcagccctgggtttgcgcagggacgcggctgctctgggcgtggttccgggaaacgcagcggcgccgaccctgggtctcgcacattcttcacgtccgttcgcagcgtcacccggatcttcgccgctacccttgtgggccccccggcgacgcttcctgctccgcccctaagtcgggaaggttccttgcggttcgcggcgtgccggacgtgacaaacggaagccgcacgtctcactagtaccctcgcagacggacagcgccagggagcaatggcagcgcgccgaccgcgatgggctgtggccaatagcggctgctcagcagggcgcgccgagagcagcggccgggaaggggcggtgcgggaggcggggtgtggggcggtagtgtgggccctgttcctgcccgcgcggtgttccgcattctgcaagcctccggagcgcacgtcggcagtcggctccctcgttgaccgaatcaccgacctctctccccagggggtacccagctgtctagagaattctagatcttgagacaaatggcagtattcatccacaattttaaaagaaaaggggggattggggggtacagtgcaggggaaagaatagtagacataatagcaacagacatacaaactaaagaattacaaaaacaaattacaaaaattcaaaattttcgggtttattacagggacagcagagatccactttggcgccggctcgaggggg

SEQ ID NO: 192 - DNA, 9246 bp, Artificial Sequence
  Synthetic Polynucleotide
cccggggttattaatagtaatcaattacggggtcattagttcatagcccatatatggagttccgcgttacataacttacggtaaatggcccgcctggctgaccgcccaacgacccccgcccattgacgtcaataatgacgtatgttcccatagtaacgccaatagggactttccattgacgtcaatgggtggagtatttacggtaaactgcccacttggcagtacatcaagtgtatcatatgccaagtacgccccctattgacgtcaatgacggtaaatggcccgcctggcattatgcccagtacatgaccttatgggactttcctacttggcagtacatctacgtattagtcatcgctattaccatggtgatgcggttttggcagtacatcaatgggcgtggatagcggtttgactcacggggatttccaagtctccaccccattgacgtcaatgggagtttgttttggcaccaaaatcaacgggactttccaaaatgtcgtaacaactccgccccattgacgcaaatgggcggtaggcgtgtacggtgggaggtctatataagcagagctctctggctaactgtcgggatcaacaagtttgtacaaaaaagcaggctccgaattcaccggtgccaccatgaccgagtacaagcccacggtgcgcctcgccacccgcgacgacgtccccagggccgtacgcaccctcgccgccgcgttcgccgactaccccgccacgcgccacaccgtcgatccggaccgccacatcgagcgggtcaccgagctgcaagaactcttcctcacgcgcgtcgggctcgacatcggcaaggtgtgggtcgcggacgacggcgccgcggtggcggtctggaccacgccggagagcgtcgaagcgggggcggtgttcgccgagatcggcccgcgcatggccgagttgagcggttcccggctggccgcgcagcaacagatggaaggcctcctggcgccgcaccggcccaaggagcccgcgtggttcctggccaccgtcggcgtctcgcccgaccaccagggcaagggtctgggcagcgccgtcgtgctccccggagtggaggcggccgagcgcgccggggtgcccgccttcctggagacctccgcgccccgcaacctccccttctacgagcggctcggcttcaccgtcaccgccgacgtcgaggtgcccgaaggaccgcgcacctggtgcatgacccgcaagcccggtgcctgattaattaagaattcgacccagctttcttgtacaaagtggttggtaagcctatccctaaccctctcctcggtctcgattctacgtagtaatgagctagcagtctcgaggttaacgaattccgccccccccctaacgttactggccgaagccgcttggaataaggccggtgtgcgcttgtctatatgttattttccaccatattgccgtcttttggcaatgtgagggcccggaaacctggccctgtcttcttgacgagcattcctaggggtctttcccctctcgccaaaggaatgcaaggtctgttgaatgtcgtgaaggaagcagttcctctggaagcttcttgaagacaaacaacgtctgtagcgaccctttgcaggcagcggaaccccccacctggcgacaggtgcccctgcggccaaaagccacgtgtataagatacacctgcaaaggcggcacaaccccagtgccacgttgtgagttggatagttgtggaaagagtcaaatggctctcctcaagcgtattcaacaaggggctgaaggatgcccagaaggtaccccattgtatgggatctgatctggggcctcggtgcacatgctttacatgtgtttagtcgaggttaaaaaaacgtctaggccccccgaaccacggggacgtggttttcctttgaaaaacacgataataccatggtgagcaagggcgaggaggataacatggccatcatcaaggagttcatgcgcttcaaggtgcacatggagggctccgtgaacggccacgagttcgagatcgagggcgagggcgagggccgcccctacgagggcacccagaccgccaagctgaaggtgaccaagggtggccccctgcccttcgcctgggacatcctgtcccctcagttcatgtacggctccaaggcctacgtgaagcaccccgccgacatccccgactacttgaagctgtccttccccgagggcttcaagtgggagcgcgtgatgaacttcgaggacggcggcgtggtgaccgtgacccaggactcctccctgcaggacggcgagttcatctacaaggtgaagctgcgcggcaccaacttcccctccgacggccccgtaatgcagaagaagaccatgggctgggaggcctcctccgagcggatgtaccccgaggacggcgccctgaagggcgagatcaagcagaggctgaagctgaaggacggcggccactacgacgctgaggtcaagaccacctacaaggccaagaagcccgtgcagctgcccggcgcctacaacgtcaacatcaagttggacatcacctcccacaacgaggactacaccatcgtggaacagtacgaacgcgccgagggccgccactccaccggcggcatggacgagctgtacaagtaacaccggtggcgcgttaagtcgacaatcaacctctggattacaaaatttgtgaaagattgactggtattcttaactatgttgctccttttacgctatgtggatacgctgctttaatgcctttgtatcatgctattgcttcccgtatggctttcattttctcctccttgtataaatcctggttgctgtctctttatgaggagttgtggcccgttgtcaggcaacgtggcgtggtgtgcactgtgtttgctgacgcaacccccactggttggggcattgccaccacctgtcagctcctttccgggactttcgctttccccctccctattgccacggcggaactcatcgccgcctgccttgcccgctgctggacaggggctcggctgttgggcactgacaattccgtggtgttgtcggggaaatcatcgtcctttccttggctgctcgcctgtgttgccacctggattctgcgcgggacgtccttctgctacgtcccttcggccctcaatccagcggaccttccttcccgcggcctgctgccggctctgcggcctcttccgcgtcttcgccttcgccctcagacgagtcggatctccctttgggccgcctccccgcgtcgactttaagaccaatgacttacaaggcagctgtagatcttagccactttttaaaagaaaaggggggactggaagggctaattcactcccaacgaagacaagatctgctttttgcttgtactgggtctctctggttagaccagatctgagcctgggagctctctggctaactagggaacccactgcttaagcctcaataaagcttgccttgagtgcttcaagtagtgtgtgcccgtctgttgtgtgactctggtaactagagatccctcagacccttttagtcagtgtggaaaatctctagcagtacgtatagtagttcatgtcatcttattattcagtatttataacttgcaaagaaatgaatatcagagagtgagaggaacttgtttattgcagcttataatggttacaaataaagcaatagcatcacaaatttcacaaataaagcatttttttcactgcattctagttgtggtttgtccaaactcatcaatgtatcttatcatgtctggctctagctatcccgcccctaactccgcccatcccgcccctaactccgcccagttccgcccattctccgccccatggctgactaattttttttatttatgcagaggccgaggccgcctcggcctctgagctattccagaagtagtgaggaggcttttttggaggcctagggacgtacccaattcgccctatagtgagtcgtattacgcgcgctcactggccgtcgttttacaacgtcgtgactgggaaaaccctggcgttacccaacttaatcgccttgcagcacatccccctttcgccagctggcgtaatagcgaagaggcccgcaccgatcgcccttcccaacagttgcgcagcctgaatggcgaatgggacgcgccctgtagcggcgcattaagcgcggcgggtgtggtggttacgcgcagcgtgaccgctacacttgccagcgccctagcgcccgctcctttcgctttcttcccttcctttctcgccacgttcgccggctttccccgtcaagctctaaatcgggggctccctttagggttccgatttagtgctttacggcacctcgaccccaaaaaacttgattagggtgatggttcacgtagtgggccatcgccctgatagacggtttttcgccctttgacgttggagtccacgttctttaatagtggactcttgttccaaactggaacaacactcaaccctatctcggtctattcttttgatttataagggattttgccgatttcggcctattggttaaaaaatgagctgatttaacaaaaatttaacgcgaattttaacaaaatattaacgcttacaatttaggtggcacttttcggggaaatgtgcgcggaacccctatttgtttatttttctaaatacattcaaatatgtatccgctcatgagacaataaccctgataaatgcttcaataatattgaaaaaggaagagtatgagtattcaacatttccgtgtcgcccttattcccttttttgcggcattttgccttcctgtttttgctcacccagaaacgctggtgaaagtaaaagatgctgaagatcagttgggtgcacgagtgggttacatcgaactggatctcaacagcggtaagatccttgagagttttcgccccgaagaacgttttccaatgatgagcacttttaaagttctgctatgtggcgcggtattatcccgtattgacgccgggcaagagcaactcggtcgccgcatacactattctcagaatgacttggttgagtactcaccagtcacagaaaagcatcttacggatggcatgacagtaagagaattatgcagtgctgccataaccatgagtgataacactgcggccaacttacttctgacaacgatcggaggaccgaaggagctaaccgcttttttgcacaacatgggggatcatgtaactcgccttgatcgttgggaaccggagctgaatgaagccataccaaacgacgagcgtgacaccacgatgcctgtagcaatggcaacaacgttgcgcaaactattaactggcgaactacttactctagcttcccggcaacaattaatagactggatggaggcggataaagttgcaggaccacttctgcgctcggcccttccggctggctggtttattgctgataaatctggagccggtgagcgtgggtctcgcggtatcattgcagcactggggccagatggtaagccctcccgtatcgtagttatctacacgacggggagtcaggcaactatggatgaacgaaatagacagatcgctgagataggtgcctcactgattaagcattggtaactgtcagaccaagtttactcatatatactttagattgatttaaaacttcatttttaatttaaaaggatctaggtgaagatcctttttgataatctcatgaccaaaatcccttaacgtgagttttcgttccactgagcgtcagaccccgtagaaaagatcaaaggatcttcttgagatcctttttttctgcgcgtaatctgctgcttgcaaacaaaaaaaccaccgctaccagcggtggtttgtttgccggatcaagagctaccaactctttttccgaaggtaactggcttcagcagagcgcagataccaaatactgttcttctagtgtagccgtagttaggccaccacttcaagaactctgtagcaccgcctacatacctcgctctgctaatcctgttaccagtggctgctgccagtggcgataagtcgtgtcttaccgggttggactcaagacgatagttaccggataaggcgcagcggtcgggctgaacggggggttcgtgcacacagcccagcttggagcgaacgacctacaccgaactgagatacctacagcgtgagctatgagaaagcgccacgcttcccgaagggagaaaggcggacaggtatccggtaagcggcagggtcggaacaggagagcgcacgagggagcttccagggggaaacgcctggtatctttatagtcctgtcgggtttcgccacctctgacttgagcgtcgatttttgtgatgctcgtcaggggggcggagcctatggaaaaacgccagcaacgcggcctttttacggttcctggccttttgctggccttttgctcacatgttctttcctgcgttatcccctgattctgtggataaccgtattaccgcctttgagtgagctgataccgctcgccgcagccgaacgaccgagcgcagcgagtcagtgagcgaggaagcggaagagcgcccaatacgcaaaccgcctctccccgcgcgttggccgattcattaatgcagctggcacgacaggtttcccgactggaaagcgggcagtgagcgcaacgcaattaatgtgagttagctcactcattaggcaccccaggctttacactttatgcttccggctcgtatgttgtgtggaattgtgagcggataacaatttcacacaggaaacagctatgaccatgattacgccaagcgcgcaattaaccctcactaaagggaacaaaagctggagctgcaagcttaatgtagtcttatgcaatactcttgtagtcttgcaacatggtaacgatgagttagcaacatgccttacaaggagagaaaaagcaccgtgcatgccgattggtggaagtaaggtggtacgatcgtgccttattaggaaggcaacagacgggtctgacatggattggacgaaccactgaattgccgcattgcagagatattgtatttaagtgcctagctcgatacataaacgggtctctctggttagaccagatctgagcctgggagctctctggctaactagggaacccactgcttaagcctcaataaagcttgccttgagtgcttcaagtagtgtgtgcccgtctgttgtgtgactctggtaactagagatccctcagacccttttagtcagtgtggaaaatctctagcagtggcgcccgaacagggacttgaaagcgaaagggaaaccagaggagctctctcgacgcaggactcggcttgctgaagcgcgcacggcaagaggcgaggggcggcgactggtgagtacgccaaaaattttgactagcggaggctagaaggagagagatgggtgcgagagcgtcagtattaagcgggggagaattagatcgcgatgggaaaaaattcggttaaggccagggggaaagaaaaaatataaattaaaacatatagtatgggcaagcagggagctagaacgattcgcagttaatcctggcctgttagaaacatcagaaggctgtagacaaatactgggacagctacaaccatcccttcagacaggatcagaagaacttagatcattatataatacagtagcaaccctctattgtgtgcatcaaaggatagagataaaagacaccaaggaagctttagacaagatagaggaagagcaaaacaaaagtaagaccaccgcacagcaagcggccgctgatcttcagacctggaggaggagatatgagggacaattggagaagtgaattatataaatataaagtagtaaaaattgaaccattaggagtagcacccaccaaggcaaagagaagagtggtgcagagagaaaaaagagcagtgggaataggagctttgttccttgggttcttgggagcagcaggaagcactatgggcgcagcgtcaatgacgctgacggtacaggccagacaattattgtctggtatagtgcagcagcagaacaatttgctgagggctattgaggcgcaacagcatctgttgcaactcacagtctggggcatcaagcagctccaggcaagaatcctggctgtggaaagatacctaaaggatcaacagctcctggggatttggggttgctctggaaaactcatttgcaccactgctgtgccttggaatgctagttggagtaataaatctctggaacagatttggaatcacacgacctggatggagtgggacagagaaattaacaattacacaagcttaatacactccttaattgaagaatcgcaaaaccagcaagaaaagaatgaacaagaattattggaattagataaatgggcaagtttgtggaattggtttaacataacaaattggctgtggtatataaaattattcataatgatagtaggaggcttggtaggtttaagaatagtttttgctgtactttctatagtgaatagagttaggcagggatattcaccattatcgtttcagacccacctcccaaccccgaggggacccttgcgccttttccaaggcagccctgggtttgcgcagggacgcggctgctctgggcgtggttccgggaaacgcagcggcgccgaccctgggtctcgcacattcttcacgtccgttcgcagcgtcacccggatcttcgccgctacccttgtgggccccccggcgacgcttcctgctccgcccctaagtcgggaaggttccttgcggttcgcggcgtgccggacgtgacaaacggaagccgcacgtctcactagtaccctcgcagacggacagcgccagggagcaatggcagcgcgccgaccgcgatgggctgtggccaatagcggctgctcagcagggcgcgccgagagcagcggccgggaaggggcggtgcgggaggcggggtgtggggcggtagtgtgggccctgttcctgcccgcgcggtgttccgcattctgcaagcctccggagcgcacgtcggcagtcggctccctcgttgaccgaatcaccgacctctctccccagggggtacccagctgtctagagaattctagatcttgagacaaatggcagtattcatccacaattttaaaagaaaaggggggattggggggtacagtgcaggggaaagaatagtagacataatagcaacagacatacaaactaaagaattacaaaaacaaattacaaaaattcaaaattttcgggtttattacagggacagcagagatccactttggcgccggctcgaggggg

SEQ ID NO: 193 - DNA, 9681 bp, Artificial Sequence
  Synthetic Polynucleotide
cccggggttattaatagtaatcaattacggggtcattagttcatagcccatatatggagttccgcgttacataacttacggtaaatggcccgcctggctgaccgcccaacgacccccgcccattgacgtcaataatgacgtatgttcccatagtaacgccaatagggactttccattgacgtcaatgggtggagtatttacggtaaactgcccacttggcagtacatcaagtgtatcatatgccaagtacgccccctattgacgtcaatgacggtaaatggcccgcctggcattatgcccagtacatgaccttatgggactttcctacttggcagtacatctacgtattagtcatcgctattaccatggtgatgcggttttggcagtacatcaatgggcgtggatagcggtttgactcacggggatttccaagtctccaccccattgacgtcaatgggagtttgttttggcaccaaaatcaacgggactttccaaaatgtcgtaacaactccgccccattgacgcaaatgggcggtaggcgtgtacggtgggaggtctatataagcagagctctctggctaactgtcgggatcaacaagtttgtacaaaaaagcaggctccgaattcaccggtgccaccatgaaaaagcctgaactcaccgcgacgtctgtcgagaagtttctgatcgaaaagttcgacagcgtctccgacctgatgcagctctcggagggcgaagaatctcgtgctttcagcttcgatgtaggagggcgtggatatgtcctgcgggtaaatagctgcgccgatggtttctacaaagatcgttatgtttatcggcactttgcatcggccgcgctcccgattccggaagtgcttgacattggggaatttagcgagagcctgacctattgcatctcccgccgtgcacagggtgtcacgttgcaagacctgcctgaaaccgaactgcccgctgttctgcagccggtcgcggaggccatggatgcgatcgctgcggccgatcttagccagacgagcgggttcggcccattcggaccgcaaggaatcggtcaatacactacatggcgtgatttcatatgcgcgattgctgatccccatgtgtatcactggcaaactgtgatggacgacaccgtcagtgcgtccgtcgcgcaggctctcgatgagctgatgctttgggccgaggactgccccgaagtccggcacctcgtgcacgcggatttcggctccaacaatgtcctgacggacaatggccgcataacagcggtcattgactggagcgaggcgatgttcggggattcccaatacgaggtcgccaacatcttcttctggaggccgtggttggcttgtatggagcagcagacgcgctacttcgagcggaggcatccggagcttgcaggatcgccgcggctccgggcgtatatgctccgcattggtcttgaccaactctatcagagcttggttgacggcaatttcgatgatgcagcttgggcgcagggtcgatgcgacgcaatcgtccgatccggagccgggactgtcgggcgtacacaaatcgcccgcagaagcgcggccgtctggaccgatggctgtgtagaagtactcgccgatagtggaaaccgacgccccagcactcgtccgagggcaaaggaatagttaattaagaattcgacccagctttcttgtacaaagtggttggtaagcctatccctaaccctctcctcggtctcgattctacgtagtaatgagctagcagtctcgaggttaacgaattccgccccccccctaacgttactggccgaagccgcttggaataaggccggtgtgcgcttgtctatatgttattttccaccatattgccgtcttttggcaatgtgagggcccggaaacctggccctgtcttcttgacgagcattcctaggggtctttcccctctcgccaaaggaatgcaaggtctgttgaatgtcgtgaaggaagcagttcctctggaagcttcttgaagacaaacaacgtctgtagcgaccctttgcaggcagcggaaccccccacctggcgacaggtgcccctgcggccaaaagccacgtgtataagatacacctgcaaaggcggcacaaccccagtgccacgttgtgagttggatagttgtggaaagagtcaaatggctctcctcaagcgtattcaacaaggggctgaaggatgcccagaaggtaccccattgtatgggatctgatctggggcctcggtgcacatgctttacatgtgtttagtcgaggttaaaaaaacgtctaggccccccgaaccacggggacgtggttttcctttgaaaaacacgataataccatggtgagcaagggcgaggagctgttcaccggggtggtgcccatcctggtcgagctggacggcgacgtaaacggccacaagttcagcgtgtccggcgagggcgagggcgatgccacctacggcaagctgaccctgaagttcatctgcaccaccggcaagctgcccgtgccctggcccaccctcgtgaccaccctgacctacggcgtgcagtgcttcagccgctaccccgaccacatgaagcagcacgacttcttcaagtccgccatgcccgaaggctacgtccaggagcgcaccatcttcttcaaggacgacggcaactacaagacccgcgccgaggtgaagttcgagggcgacaccctggtgaaccgcatcgagctgaagggcatcgacttcaaggaggacggcaacatcctggggcacaagctggagtacaactacaacagccacaacgtctatatcatggccgacaagcagaagaacggcatcaaggtgaacttcaagatccgccacaacatcgaggacggcagcgtgcagctcgccgaccactaccagcagaacacccccatcggcgacggccccgtgctgctgcccgacaaccactacctgagcacccagtccgccctgagcaaagaccccaacgagaagcgcgatcacatggtcctgctggagttcgtgaccgccgccgggatcactctcggcatggacgagctgtacaagtaacaccggtggcgcgttaagtcgacaatcaacctctggattacaaaatttgtgaaagattgactggtattcttaactatgttgctccttttacgctatgtggatacgctgctttaatgcctttgtatcatgctattgcttcccgtatggctttcattttctcctccttgtataaatcctggttgctgtctctttatgaggagttgtggcccgttgtcaggcaacgtggcgtggtgtgcactgtgtttgctgacgcaacccccactggttggggcattgccaccacctgtcagctcctttccgggactttcgctttccccctccctattgccacggcggaactcatcgccgcctgccttgcccgctgctggacaggggctcggctgttgggcactgacaattccgtggtgttgtcggggaaatcatcgtcctttccttggctgctcgcctgtgttgccacctggattctgcgcgggacgtccttctgctacgtcccttcggccctcaatccagcggaccttccttcccgcggcctgctgccggctctgcggcctcttccgcgtcttcgccttcgccctcagacgagtcggatctccctttgggccgcctccccgcgtcgactttaagaccaatgacttacaaggcagctgtagatcttagccactttttaaaagaaaaggggggactggaagggctaattcactcccaacgaagacaagatctgctttttgcttgtactgggtctctctggttagaccagatctgagcctgggagctctctggctaactagggaacccactgcttaagcctcaataaagcttgccttgagtgcttcaagtagtgtgtgcccgtctgttgtgtgactctggtaactagagatccctcagacccttttagtcagtgtggaaaatctctagcagtacgtatagtagttcatgtcatcttattattcagtatttataacttgcaaagaaatgaatatcagagagtgagaggaacttgtttattgcagcttataatggttacaaataaagcaatagcatcacaaatttcacaaataaagcatttttttcactgcattctagttgtggtttgtccaaactcatcaatgtatcttatcatgtctggctctagctatcccgcccctaactccgcccatcccgcccctaactccgcccagttccgcccattctccgccccatggctgactaattttttttatttatgcagaggccgaggccgcctcggcctctgagctattccagaagtagtgaggaggcttttttggaggcctagggacgtacccaattcgccctatagtgagtcgtattacgcgcgctcactggccgtcgttttacaacgtcgtgactgggaaaaccctggcgttacccaacttaatcgccttgcagcacatccccctttcgccagctggcgtaatagcgaagaggcccgcaccgatcgcccttcccaacagttgcgcagcctgaatggcgaatgggacgcgccctgtagcggcgcattaagcgcggcgggtgtggtggttacgcgcagcgtgaccgctacacttgccagcgccctagcgcccgctcctttcgctttcttcccttcctttctcgccacgttcgccggctttccccgtcaagctctaaatcgggggctccctttagggttccgatttagtgctttacggcacctcgaccccaaaaaacttgattagggtgatggttcacgtagtgggccatcgccctgatagacggtttttcgccctttgacgttggagtccacgttctttaatagtggactcttgttccaaactggaacaacactcaaccctatctcggtctattcttttgatttataagggattttgccgatttcggcctattggttaaaaaatgagctgatttaacaaaaatttaacgcgaattttaacaaaatattaacgcttacaatttaggtggcacttttcggggaaatgtgcgcggaacccctatttgtttatttttctaaatacattcaaatatgtatccgctcatgagacaataaccctgataaatgcttcaataatattgaaaaaggaagagtatgagtattcaacatttccgtgtcgcccttattcccttttttgcggcattttgccttcctgtttttgctcacccagaaacgctggtgaaagtaaaagatgctgaagatcagttgggtgcacgagtgggttacatcgaactggatctcaacagcggtaagatccttgagagttttcgccccgaagaacgttttccaatgatgagcacttttaaagttctgctatgtggcgcggtattatcccgtattgacgccgggcaagagcaactcggtcgccgcatacactattctcagaatgacttggttgagtactcaccagtcacagaaaagcatcttacggatggcatgacagtaagagaattatgcagtgctgccataaccatgagtgataacactgcggccaacttacttctgacaacgatcggaggaccgaaggagctaaccgcttttttgcacaacatgggggatcatgtaactcgccttgatcgttgggaaccggagctgaatgaagccataccaaacgacgagcgtgacaccacgatgcctgtagcaatggcaacaacgttgcgcaaactattaactggcgaactacttactctagcttcccggcaacaattaatagactggatggaggcggataaagttgcaggaccacttctgcgctcggcccttccggctggctggtttattgctgataaatctggagccggtgagcgtgggtctcgcggtatcattgcagcactggggccagatggtaagccctcccgtatcgtagttatctacacgacggggagtcaggcaactatggatgaacgaaatagacagatcgctgagataggtgcctcactgattaagcattggtaactgtcagaccaagtttactcatatatactttagattgatttaaaacttcatttttaatttaaaaggatctaggtgaagatcctttttgataatctcatgaccaaaatcccttaacgtgagttttcgttccactgagcgtcagaccccgtagaaaagatcaaaggatcttcttgagatcctttttttctgcgcgtaatctgctgcttgcaaacaaaaaaaccaccgctaccagcggtggtttgtttgccggatcaagagctaccaactctttttccgaaggtaactggcttcagcagagcgcagataccaaatactgttcttctagtgtagccgtagttaggccaccacttcaagaactctgtagcaccgcctacatacctcgctctgctaatcctgttaccagtggctgctgccagtggcgataagtcgtgtcttaccgggttggactcaagacgatagttaccggataaggcgcagcggtcgggctgaacggggggttcgtgcacacagcccagcttggagcgaacgacctacaccgaactgagatacctacagcgtgagctatgagaaagcgccacgcttcccgaagggagaaaggcggacaggtatccggtaagcggcagggtcggaacaggagagcgcacgagggagcttccagggggaaacgcctggtatctttatagtcctgtcgggtttcgccacctctgacttgagcgtcgatttttgtgatgctcgtcaggggggcggagcctatggaaaaacgccagcaacgcggcctttttacggttcctggccttttgctggccttttgctcacatgttctttcctgcgttatcccctgattctgtggataaccgtattaccgcctttgagtgagctgataccgctcgccgcagccgaacgaccgagcgcagcgagtcagtgagcgaggaagcggaagagcgcccaatacgcaaaccgcctctccccgcgcgttggccgattcattaatgcagctggcacgacaggtttcccgactggaaagcgggcagtgagcgcaacgcaattaatgtgagttagctcactcattaggcaccccaggctttacactttatgcttccggctcgtatgttgtgtggaattgtgagcggataacaatttcacacaggaaacagctatgaccatgattacgccaagcgcgcaattaaccctcactaaagggaacaaaagctggagctgcaagcttaatgtagtcttatgcaatactcttgtagtcttgcaacatggtaacgatgagttagcaacatgccttacaaggagagaaaaagcaccgtgcatgccgattggtggaagtaaggtggtacgatcgtgccttattaggaaggcaacagacgggtctgacatggattggacgaaccactgaattgccgcattgcagagatattgtatttaagtgcctagctcgatacataaacgggtctctctggttagaccagatctgagcctgggagctctctggctaactagggaacccactgcttaagcctcaataaagcttgccttgagtgcttcaagtagtgtgtgcccgtctgttgtgtgactctggtaactagagatccctcagacccttttagtcagtgtggaaaatctctagcagtggcgcccgaacagggacttgaaagcgaaagggaaaccagaggagctctctcgacgcaggactcggcttgctgaagcgcgcacggcaagaggcgaggggcggcgactggtgagtacgccaaaaattttgactagcggaggctagaaggagagagatgggtgcgagagcgtcagtattaagcgggggagaattagatcgcgatgggaaaaaattcggttaaggccagggggaaagaaaaaatataaattaaaacatatagtatgggcaagcagggagctagaacgattcgcagttaatcctggcctgttagaaacatcagaaggctgtagacaaatactgggacagctacaaccatcccttcagacaggatcagaagaacttagatcattatataatacagtagcaaccctctattgtgtgcatcaaaggatagagataaaagacaccaaggaagctttagacaagatagaggaagagcaaaacaaaagtaagaccaccgcacagcaagcggccgctgatcttcagacctggaggaggagatatgagggacaattggagaagtgaattatataaatataaagtagtaaaaattgaaccattaggagtagcacccaccaaggcaaagagaagagtggtgcagagagaaaaaagagcagtgggaataggagctttgttccttgggttcttgggagcagcaggaagcactatgggcgcagcgtcaatgacgctgacggtacaggccagacaattattgtctggtatagtgcagcagcagaacaatttgctgagggctattgaggcgcaacagcatctgttgcaactcacagtctggggcatcaagcagctccaggcaagaatcctggctgtggaaagatacctaaaggatcaacagctcctggggatttggggttgctctggaaaactcatttgcaccactgctgtgccttggaatgctagttggagtaataaatctctggaacagatttggaatcacacgacctggatggagtgggacagagaaattaacaattacacaagcttaatacactccttaattgaagaatcgcaaaaccagcaagaaaagaatgaacaagaattattggaattagataaatgggcaagtttgtggaattggtttaacataacaaattggctgtggtatataaaattattcataatgatagtaggaggcttggtaggtttaagaatagtttttgctgtactttctatagtgaatagagttaggcagggatattcaccattatcgtttcagacccacctcccaaccccgaggggacccttgcgccttttccaaggcagccctgggtttgcgcagggacgcggctgctctgggcgtggttccgggaaacgcagcggcgccgaccctgggtctcgcacattcttcacgtccgttcgcagcgtcacccggatcttcgccgctacccttgtgggccccccggcgacgcttcctgctccgcccctaagtcgggaaggttccttgcggttcgcggcgtgccggacgtgacaaacggaagccgcacgtctcactagtaccctcgcagacggacagcgccagggagcaatggcagcgcgccgaccgcgatgggctgtggccaatagcggctgctcagcagggcgcgccgagagcagcggccgggaaggggcggtgcgggaggcggggtgtggggcggtagtgtgggccctgttcctgcccgcgcggtgttccgcattctgcaagcctccggagcgcacgtcggcagtcggctccctcgttgaccgaatcaccgacctctctccccagggggtacccagctgtctagagaattctagatcttgagacaaatggcagtattcatccacaattttaaaagaaaaggggggattggggggtacagtgcaggggaaagaatagtagacataatagcaacagacatacaaactaaagaattacaaaaacaaattacaaaaattcaaaattttcgggtttattacagggacagcagagatccactttggcgccggctcgaggggg

SEQ ID NO: 194 - DNA, 9771 bp, Artificial Sequence
  Synthetic Polynucleotide
ctcgagggggcccggggttattaatagtaatcaattacggggtcattagttcatagcccatatatggagttccgcgttacataacttacggtaaatggcccgcctggctgaccgcccaacgacccccgcccattgacgtcaataatgacgtatgttcccatagtaacgccaatagggactttccattgacgtcaatgggtggagtatttacggtaaactgcccacttggcagtacatcaagtgtatcatatgccaagtacgccccctattgacgtcaatgacggtaaatggcccgcctggcattatgcccagtacatgaccttatgggactttcctacttggcagtacatctacgtattagtcatcgctattaccatggtgatgcggttttggcagtacatcaatgggcgtggatagcggtttgactcacggggatttccaagtctccaccccattgacgtcaatgggagtttgttttggcaccaaaatcaacgggactttccaaaatgtcgtaacaactccgccccattgacgcaaatgggcggtaggcgtgtacggtgggaggtctatataagcagagctctctggctaactgtcgggatcaacaagtttgtacaaaaaagcaggctccgaattcgcccttgccgccaccatgccaaaaaaaaaacgcaaagtggtgagcaagggcgaggagctgttcaccggggtggtgcccatcctggtcgagctggacggcgacgtaaacggccacaagttcagcgtgtccggcgagggcgagggcgatgccacctacggcaagctgaccctgaagttcatctgcaccaccggcaagctgcccgtgccctggcccaccctcgtgaccaccctgacctacggcgtgcagtgcttcagccgctaccccgaccacatgaagcagcacgacttcttcaagtccgccatgcccgaaggctacgtccaggagcgcaccatcttcttcaaggacgacggcaactacaagacccgcgccgaggtgaagttcgagggcgacaccctggtgaaccgcatcgagctgaagggcatcgacttcaaggaggacggcaacatcctggggcacaagctggagtacaactacaacagccacaacgtctatatcatggccgacaagcagaagaacggcatcaaggtgaacttcaagatccgccacaacatcgaggacggcagcgtgcagctcgccgaccactaccagcagaacacccccatcggcgacggccccgtgctgctgcccgacaaccactacctgagcacccagtccgccctgagcaaagaccccaacgagaagcgcgatcacatggtcctgctggagttcgtgaccgccgccgggatcactctcggcatggacgagctgtacaagtaaaagggcgaattcgacccagctttcttgtacaaagtggttggtaagcctatccctaaccctctcctcggtctcgattctacgtagtaatgagctagcagtctcgaggttaacgaattccgcccccccccctaacgttactggccgaagccgcttggaataaggccggtgtgcgtttgtctatatgttattttccaccatattgccgtcttttggcaatgtgagggcccggaaacctggccctgtcttcttgacgagcattcctaggggtctttcccctctcgccaaaggaatgcaaggtctgttgaatgtcgtgaaggaagcagttcctctggaagcttcttgaagacaaacaacgtctgtagcgaccctttgcaggcagcggaaccccccacctggcgacaggtgcctctgcggccaaaagccacgtgtataagatacacctgcaaaggcggcacaaccccagtgccacgttgtgagttggatagttgtggaaagagtcaaatggctctcctcaagcgtattcaacaaggggctgaaggatgcccagaaggtaccccattgtatgggatctgatctggggcctcggtgcacatgctttacatgtgtttagtcgaggttaaaaaaacgtctaggccccccgaaccacggggacgtggttttcctttgaaaaacacgatgataatatggccacaaccgccaccatgaaaaagcctgaactcaccgcgacgtctgtcgagaagtttctgatcgaaaagttcgacagcgtctccgacctgatgcagctctcggagggcgaagaatctcgtgctttcagcttcgatgtaggagggcgtggatatgtcctgcgggtaaatagctgcgccgatggtttctacaaagatcgttatgtttatcggcactttgcatcggccgcgctcccgattccggaagtgcttgacattggggaatttagcgagagcctgacctattgcatctcccgccgtgcacagggtgtcacgttgcaagacctgcctgaaaccgaactgcccgctgttctgcagccggtcgcggaggccatggatgcgatcgctgcggccgatcttagccagacgagcgggttcggcccattcggaccgcaaggaatcggtcaatacactacatggcgtgatttcatatgcgcgattgctgatccccatgtgtatcactggcaaactgtgatggacgacaccgtcagtgcgtccgtcgcgcaggctctcgatgagctgatgctttgggccgaggactgccccgaagtccggcacctcgtgcacgcggatttcggctccaacaatgtcctgacggacaatggccgcataacagcggtcattgactggagcgaggcgatgttcggggattcccaatacgaggtcgccaacatcttcttctggaggccgtggttggcttgtatggagcagcagacgcgctacttcgagcggaggcatccggagcttgcaggatcgccgcggctccgggcgtatatgctccgcattggtcttgaccaactctatcagagcttggttgacggcaatttcgatgatgcagcttgggcgcagggtcgatgcgacgcaatcgtccgatccggagccgggactgtcgggcgtacacaaatcgcccgcagaagcgcggccgtctggaccgatggctgtgtagaagtactcgccgatagtggaaaccgacgccccagcactcgtccgagggcaaaggaatagacgcgtaccggttagcaccggtgtgatcagggtcagacagctgcctgcaggccggtggcgcgttaagtcgacaatcaacctctggattacaaaatttgtgaaagattgactggtattcttaactatgttgctccttttacgctatgtggatacgctgctttaatgcctttgtatcatgctattgcttcccgtatggctttcattttctcctccttgtataaatcctggttgctgtctctttatgaggagttgtggcccgttgtcaggcaacgtggcgtggtgtgcactgtgtttgctgacgcaacccccactggttggggcattgccaccacctgtcagctcctttccgggactttcgctttccccctccctattgccacggcggaactcatcgccgcctgccttgcccgctgctggacaggggctcggctgttgggcactgacaattccgtggtgttgtcggggaaatcatcgtcctttccttggctgctcgcctgtgttgccacctggattctgcgcgggacgtccttctgctacgtcccttcggccctcaatccagcggaccttccttcccgcggcctgctgccggctctgcggcctcttccgcgtcttcgccttcgccctcagacgagtcggatctccctttgggccgcctccccgcgtcgactttaagaccaatgacttacaaggcagctgtagatcttagccactttttaaaagaaaaggggggactggaagggctaattcactcccaacgaagacaagatctgctttttgcttgtactgggtctctctggttagaccagatctgagcctgggagctctctggctaactagggaacccactgcttaagcctcaataaagcttgccttgagtgcttcaagtagtgtgtgcccgtctgttgtgtgactctggtaactagagatccctcagacccttttagtcagtgtggaaaatctctagcagtacgtatagtagttcatgtcatcttattattcagtatttataacttgcaaagaaatgaatatcagagagtgagaggaacttgtttattgcagcttataatggttacaaataaagcaatagcatcacaaatttcacaaataaagcatttttttcactgcattctagttgtggtttgtccaaactcatcaatgtatcttatcatgtctggctctagctatcccgcccctaactccgcccatcccgcccctaactccgcccagttccgcccattctccgccccatggctgactaattttttttatttatgcagaggccgaggccgcctcggcctctgagctattccagaagtagtgaggaggcttttttggaggcctagggacgtacccaattcgccctatagtgagtcgtattacgcgcgctcactggccgtcgttttacaacgtcgtgactgggaaaaccctggcgttacccaacttaatcgccttgcagcacatccccctttcgccagctggcgtaatagcgaagaggcccgcaccgatcgcccttcccaacagttgcgcagcctgaatggcgaatgggacgcgccctgtagcggcgcattaagcgcggcgggtgtggtggttacgcgcagcgtgaccgctacacttgccagcgccctagcgcccgctcctttcgctttcttcccttcctttctcgccacgttcgccggctttccccgtcaagctctaaatcgggggctccctttagggttccgatttagtgctttacggcacctcgaccccaaaaaacttgattagggtgatggttcacgtagtgggccatcgccctgatagacggtttttcgccctttgacgttggagtccacgttctttaatagtggactcttgttccaaactggaacaacactcaaccctatctcggtctattcttttgatttataagggattttgccgatttcggcctattggttaaaaaatgagctgatttaacaaaaatttaacgcgaattttaacaaaatattaacgcttacaatttaggtggcacttttcggggaaatgtgcgcggaacccctatttgtttatttttctaaatacattcaaatatgtatccgctcatgagacaataaccctgataaatgcttcaataatattgaaaaaggaagagtatgagtattcaacatttccgtgtcgcccttattcccttttttgcggcattttgccttcctgtttttgctcacccagaaacgctggtgaaagtaaaagatgctgaagatcagttgggtgcacgagtgggttacatcgaactggatctcaacagcggtaagatccttgagagttttcgccccgaagaacgttttccaatgatgagcacttttaaagttctgctatgtggcgcggtattatcccgtattgacgccgggcaagagcaactcggtcgccgcatacactattctcagaatgacttggttgagtactcaccagtcacagaaaagcatcttacggatggcatgacagtaagagaattatgcagtgctgccataaccatgagtgataacactgcggccaacttacttctgacaacgatcggaggaccgaaggagctaaccgcttttttgcacaacatgggggatcatgtaactcgccttgatcgttgggaaccggagctgaatgaagccataccaaacgacgagcgtgacaccacgatgcctgtagcaatggcaacaacgttgcgcaaactattaactggcgaactacttactctagcttcccggcaacaattaatagactggatggaggcggataaagttgcaggaccacttctgcgctcggcccttccggctggctggtttattgctgataaatctggagccggtgagcgtgggtctcgcggtatcattgcagcactggggccagatggtaagccctcccgtatcgtagttatctacacgacggggagtcaggcaactatggatgaacgaaatagacagatcgctgagataggtgcctcactgattaagcattggtaactgtcagaccaagtttactcatatatactttagattgatttaaaacttcatttttaatttaaaaggatctaggtgaagatcctttttgataatctcatgaccaaaatcccttaacgtgagttttcgttccactgagcgtcagaccccgtagaaaagatcaaaggatcttcttgagatcctttttttctgcgcgtaatctgctgcttgcaaacaaaaaaaccaccgctaccagcggtggtttgtttgccggatcaagagctaccaactctttttccgaaggtaactggcttcagcagagcgcagataccaaatactgttcttctagtgtagccgtagttaggccaccacttcaagaactctgtagcaccgcctacatacctcgctctgctaatcctgttaccagtggctgctgccagtggcgataagtcgtgtcttaccgggttggactcaagacgatagttaccggataaggcgcagcggtcgggctgaacggggggttcgtgcacacagcccagcttggagcgaacgacctacaccgaactgagatacctacagcgtgagctatgagaaagcgccacgcttcccgaagggagaaaggcggacaggtatccggtaagcggcagggtcggaacaggagagcgcacgagggagcttccagggggaaacgcctggtatctttatagtcctgtcgggtttcgccacctctgacttgagcgtcgatttttgtgatgctcgtcaggggggcggagcctatggaaaaacgccagcaacgcggcctttttacggttcctggccttttgctggccttttgctcacatgttctttcctgcgttatcccctgattctgtggataaccgtattaccgcctttgagtgagctgataccgctcgccgcagccgaacgaccgagcgcagcgagtcagtgagcgaggaagcggaagagcgcccaatacgcaaaccgcctctccccgcgcgttggccgattcattaatgcagctggcacgacaggtttcccgactggaaagcgggcagtgagcgcaacgcaattaatgtgagttagctcactcattaggcaccccaggctttacactttatgcttccggctcgtatgttgtgtggaattgtgagcggataacaatttcacacaggaaacagctatgaccatgattacgccaagcgcgcaattaaccctcactaaagggaacaaaagctggagctgcaagcttaatgtagtcttatgcaatactcttgtagtcttgcaacatggtaacgatgagttagcaacatgccttacaaggagagaaaaagcaccgtgcatgccgattggtggaagtaaggtggtacgatcgtgccttattaggaaggcaacagacgggtctgacatggattggacgaaccactgaattgccgcattgcagagatattgtatttaagtgcctagctcgatacataaacgggtctctctggttagaccagatctgagcctgggagctctctggctaactagggaacccactgcttaagcctcaataaagcttgccttgagtgcttcaagtagtgtgtgcccgtctgttgtgtgactctggtaactagagatccctcagacccttttagtcagtgtggaaaatctctagcagtggcgcccgaacagggacttgaaagcgaaagggaaaccagaggagctctctcgacgcaggactcggcttgctgaagcgcgcacggcaagaggcgaggggcggcgactggtgagtacgccaaaaattttgactagcggaggctagaaggagagagatgggtgcgagagcgtcagtattaagcgggggagaattagatcgcgatgggaaaaaattcggttaaggccagggggaaagaaaaaatataaattaaaacatatagtatgggcaagcagggagctagaacgattcgcagttaatcctggcctgttagaaacatcagaaggctgtagacaaatactgggacagctacaaccatcccttcagacaggatcagaagaacttagatcattatataatacagtagcaaccctctattgtgtgcatcaaaggatagagataaaagacaccaaggaagctttagacaagatagaggaagagcaaaacaaaagtaagaccaccgcacagcaagcggccgctgatcttcagacctggaggaggagatatgagggacaattggagaagtgaattatataaatataaagtagtaaaaattgaaccattaggagtagcacccaccaaggcaaagagaagagtggtgcagagagaaaaaagagcagtgggaataggagctttgttccttgggttcttgggagcagcaggaagcactatgggcgcagcgtcaatgacgctgacggtacaggccagacaattattgtctggtatagtgcagcagcagaacaatttgctgagggctattgaggcgcaacagcatctgttgcaactcacagtctggggcatcaagcagctccaggcaagaatcctggctgtggaaagatacctaaaggatcaacagctcctggggatttggggttgctctggaaaactcatttgcaccactgctgtgccttggaatgctagttggagtaataaatctctggaacagatttggaatcacacgacctggatggagtgggacagagaaattaacaattacacaagcttaatacactccttaattgaagaatcgcaaaaccagcaagaaaagaatgaacaagaattattggaattagataaatgggcaagtttgtggaattggtttaacataacaaattggctgtggtatataaaattattcataatgatagtaggaggcttggtaggtttaagaatagtttttgctgtactttctatagtgaatagagttaggcagggatattcaccattatcgtttcagacccacctcccaaccccgaggggacccttgcgccttttccaaggcagccctgggtttgcgcagggacgcggctgctctgggcgtggttccgggaaacgcagcggcgccgaccctgggtctcgcacattcttcacgtccgttcgcagcgtcacccggatcttcgccgctacccttgtgggccccccggcgacgcttcctgctccgcccctaagtcgggaaggttccttgcggttcgcggcgtgccggacgtgacaaacggaagccgcacgtctcactagtaccctcgcagacggacagcgccagggagcaatggcagcgcgccgaccgcgatgggctgtggccaatagcggctgctcagcagggcgcgccgagagcagcggccgggaaggggcggtgcgggaggcggggtgtggggcggtagtgtgggccctgttcctgcccgcgcggtgttccgcattctgcaagcctccggagcgcacgtcggcagtcggctccctcgttgaccgaatcaccgacctctctccccagggggtacccagctgtctagagaattctagatcttgagacaaatggcagtattcatccacaattttaaaagaaaaggggggattggggggtacagtgcaggggaaagaatagtagacataatagcaacagacatacaaactaaagaattacaaaaacaaattacaaaaattcaaaattttcgggtttattacagggacagcagagatccactttggcgccgg

SEQ ID NO: 195 - DNA, 9841 bp, Artificial Sequence
  Synthetic Polynucleotide
ctcgagggggcccggggttattaatagtaatcaattacggggtcattagttcatagcccatatatggagttccgcgttacataacttacggtaaatggcccgcctggctgaccgcccaacgacccccgcccattgacgtcaataatgacgtatgttcccatagtaacgccaatagggactttccattgacgtcaatgggtggagtatttacggtaaactgcccacttggcagtacatcaagtgtatcatatgccaagtacgccccctattgacgtcaatgacggtaaatggcccgcctggcattatgcccagtacatgaccttatgggactttcctacttggcagtacatctacgtattagtcatcgctattaccatggtgatgcggttttggcagtacatcaatgggcgtggatagcggtttgactcacggggatttccaagtctccaccccattgacgtcaatgggagtttgttttggcaccaaaatcaacgggactttccaaaatgtcgtaacaactccgccccattgacgcaaatgggcggtaggcgtgtacggtgggaggtctatataagcagagctctctggctaactgtcgggatcaacaagtttgtacaaaaaagcaggctccgaattcaccggtctagcgctaccggactcagatctcgagctcaagcttcgaattccaccatgggcgtggccgacctgatcaagaagttcgagagcatcagcaaggaggagggggatccaccggtcgccaccatggtgagcaagggcgaggcagtgatcaaggagttcatgcggttcaaggtgcacatggagggctccatgaacggccacgagttcgagatcgagggcgagggcgagggccgcccctacgagggcacccagaccgccaagctgaaggtgaccaagggtggccccctgcccttctcctgggacatcctgtcccctcagttcatgtacggctccagggccttcaccaagcaccccgccgacatccccgactactataagcagtccttccccgagggcttcaagtgggagcgcgtgatgaacttcgaggacggcggcgccgtgaccgtgacccaggacacctccctggaggacggcaccctgatctacaaggtgaagctccgcggcaccaacttccctcctgacggccccgtaatgcagaagaagacaatgggctgggaagcgtccaccgagcggttgtaccccgaggacggcgtgctgaagggcgacattaagatggccctgcgcctgaaggacggcggccgctacctggcggacttcaagaccacctacaaggccaagaagcccgtgcagatgcccggcgcctacaacgtcgaccgcaagttggacatcacctcccacaacgaggactacaccgtggtggaacagtacgaacgctccgagggccgccactccaccggcggcatggacgagctgtacaagtaattaattaagaattcgacccagctttcttgtacaaagtggttggtaagcctatccctaaccctctcctcggtctcgattctacgtagtaatgagctagcagtctcgaggttaacgaattccgcccccccccctaacgttactggccgaagccgcttggaataaggccggtgtgcgtttgtctatatgttattttccaccatattgccgtcttttggcaatgtgagggcccggaaacctggccctgtcttcttgacgagcattcctaggggtctttcccctctcgccaaaggaatgcaaggtctgttgaatgtcgtgaaggaagcagttcctctggaagcttcttgaagacaaacaacgtctgtagcgaccctttgcaggcagcggaaccccccacctggcgacaggtgcctctgcggccaaaagccacgtgtataagatacacctgcaaaggcggcacaaccccagtgccacgttgtgagttggatagttgtggaaagagtcaaatggctctcctcaagcgtattcaacaaggggctgaaggatgcccagaaggtaccccattgtatgggatctgatctggggcctcggtgcacatgctttacatgtgtttagtcgaggttaaaaaaacgtctaggccccccgaaccacggggacgtggttttcctttgaaaaacacgatgataatatggccacaaccgccaccatgaaaaagcctgaactcaccgcgacgtctgtcgagaagtttctgatcgaaaagttcgacagcgtctccgacctgatgcagctctcggagggcgaagaatctcgtgctttcagcttcgatgtaggagggcgtggatatgtcctgcgggtaaatagctgcgccgatggtttctacaaagatcgttatgtttatcggcactttgcatcggccgcgctcccgattccggaagtgcttgacattggggaatttagcgagagcctgacctattgcatctcccgccgtgcacagggtgtcacgttgcaagacctgcctgaaaccgaactgcccgctgttctgcagccggtcgcggaggccatggatgcgatcgctgcggccgatcttagccagacgagcgggttcggcccattcggaccgcaaggaatcggtcaatacactacatggcgtgatttcatatgcgcgattgctgatccccatgtgtatcactggcaaactgtgatggacgacaccgtcagtgcgtccgtcgcgcaggctctcgatgagctgatgctttgggccgaggactgccccgaagtccggcacctcgtgcacgcggatttcggctccaacaatgtcctgacggacaatggccgcataacagcggtcattgactggagcgaggcgatgttcggggattcccaatacgaggtcgccaacatcttcttctggaggccgtggttggcttgtatggagcagcagacgcgctacttcgagcggaggcatccggagcttgcaggatcgccgcggctccgggcgtatatgctccgcattggtcttgaccaactctatcagagcttggttgacggcaatttcgatgatgcagcttgggcgcagggtcgatgcgacgcaatcgtccgatccggagccgggactgtcgggcgtacacaaatcgcccgcagaagcgcggccgtctggaccgatggctgtgtagaagtactcgccgatagtggaaaccgacgccccagcactcgtccgagggcaaaggaatagacgcgtaccggttagcaccggtgtgatcagggtcagacagctgcctgcaggccggtggcgcgttaagtcgacaatcaacctctggattacaaaatttgtgaaagattgactggtattcttaactatgttgctccttttacgctatgtggatacgctgctttaatgcctttgtatcatgctattgcttcccgtatggctttcattttctcctccttgtataaatcctggttgctgtctctttatgaggagttgtggcccgttgtcaggcaacgtggcgtggtgtgcactgtgtttgctgacgcaacccccactggttggggcattgccaccacctgtcagctcctttccgggactttcgctttccccctccctattgccacggcggaactcatcgccgcctgccttgcccgctgctggacaggggctcggctgttgggcactgacaattccgtggtgttgtcggggaaatcatcgtcctttccttggctgctcgcctgtgttgccacctggattctgcgcgggacgtccttctgctacgtcccttcggccctcaatccagcggaccttccttcccgcggcctgctgccggctctgcggcctcttccgcgtcttcgccttcgccctcagacgagtcggatctccctttgggccgcctccccgcgtcgactttaagaccaatgacttacaaggcagctgtagatcttagccactttttaaaagaaaaggggggactggaagggctaattcactcccaacgaagacaagatctgctttttgcttgtactgggtctctctggttagaccagatctgagcctgggagctctctggctaactagggaacccactgcttaagcctcaataaagcttgccttgagtgcttcaagtagtgtgtgcccgtctgttgtgtgactctggtaactagagatccctcagacccttttagtcagtgtggaaaatctctagcagtacgtatagtagttcatgtcatcttattattcagtatttataacttgcaaagaaatgaatatcagagagtgagaggaacttgtttattgcagcttataatggttacaaataaagcaatagcatcacaaatttcacaaataaagcatttttttcactgcattctagttgtggtttgtccaaactcatcaatgtatcttatcatgtctggctctagctatcccgcccctaactccgcccatcccgcccctaactccgcccagttccgcccattctccgccccatggctgactaattttttttatttatgcagaggccgaggccgcctcggcctctgagctattccagaagtagtgaggaggcttttttggaggcctagggacgtacccaattcgccctatagtgagtcgtattacgcgcgctcactggccgtcgttttacaacgtcgtgactgggaaaaccctggcgttacccaacttaatcgccttgcagcacatccccctttcgccagctggcgtaatagcgaagaggcccgcaccgatcgcccttcccaacagttgcgcagcctgaatggcgaatgggacgcgccctgtagcggcgcattaagcgcggcgggtgtggtggttacgcgcagcgtgaccgctacacttgccagcgccctagcgcccgctcctttcgctttcttcccttcctttctcgccacgttcgccggctttccccgtcaagctctaaatcgggggctccctttagggttccgatttagtgctttacggcacctcgaccccaaaaaacttgattagggtgatggttcacgtagtgggccatcgccctgatagacggtttttcgccctttgacgttggagtccacgttctttaatagtggactcttgttccaaactggaacaacactcaaccctatctcggtctattcttttgatttataagggattttgccgatttcggcctattggttaaaaaatgagctgatttaacaaaaatttaacgcgaattttaacaaaatattaacgcttacaatttaggtggcacttttcggggaaatgtgcgcggaacccctatttgtttatttttctaaatacattcaaatatgtatccgctcatgagacaataaccctgataaatgcttcaataatattgaaaaaggaagagtatgagtattcaacatttccgtgtcgcccttattcccttttttgcggcattttgccttcctgtttttgctcacccagaaacgctggtgaaagtaaaagatgctgaagatcagttgggtgcacgagtgggttacatcgaactggatctcaacagcggtaagatccttgagagttttcgccccgaagaacgttttccaatgatgagcacttttaaagttctgctatgtggcgcggtattatcccgtattgacgccgggcaagagcaactcggtcgccgcatacactattctcagaatgacttggttgagtactcaccagtcacagaaaagcatcttacggatggcatgacagtaagagaattatgcagtgctgccataaccatgagtgataacactgcggccaacttacttctgacaacgatcggaggaccgaaggagctaaccgcttttttgcacaacatgggggatcatgtaactcgccttgatcgttgggaaccggagctgaatgaagccataccaaacgacgagcgtgacaccacgatgcctgtagcaatggcaacaacgttgcgcaaactattaactggcgaactacttactctagcttcccggcaacaattaatagactggatggaggcggataaagttgcaggaccacttctgcgctcggcccttccggctggctggtttattgctgataaatctggagccggtgagcgtgggtctcgcggtatcattgcagcactggggccagatggtaagccctcccgtatcgtagttatctacacgacggggagtcaggcaactatggatgaacgaaatagacagatcgctgagataggtgcctcactgattaagcattggtaactgtcagaccaagtttactcatatatactttagattgatttaaaacttcatttttaatttaaaaggatctaggtgaagatcctttttgataatctcatgaccaaaatcccttaacgtgagttttcgttccactgagcgtcagaccccgtagaaaagatcaaaggatcttcttgagatcctttttttctgcgcgtaatctgctgcttgcaaacaaaaaaaccaccgctaccagcggtggtttgtttgccggatcaagagctaccaactctttttccgaaggtaactggcttcagcagagcgcagataccaaatactgttcttctagtgtagccgtagttaggccaccacttcaagaactctgtagcaccgcctacatacctcgctctgctaatcctgttaccagtggctgctgccagtggcgataagtcgtgtcttaccgggttggactcaagacgatagttaccggataaggcgcagcggtcgggctgaacggggggttcgtgcacacagcccagcttggagcgaacgacctacaccgaactgagatacctacagcgtgagctatgagaaagcgccacgcttcccgaagggagaaaggcggacaggtatccggtaagcggcagggtcggaacaggagagcgcacgagggagcttccagggggaaacgcctggtatctttatagtcctgtcgggtttcgccacctctgacttgagcgtcgatttttgtgatgctcgtcaggggggcggagcctatggaaaaacgccagcaacgcggcctttttacggttcctggccttttgctggccttttgctcacatgttctttcctgcgttatcccctgattctgtggataaccgtattaccgcctttgagtgagctgataccgctcgccgcagccgaacgaccgagcgcagcgagtcagtgagcgaggaagcggaagagcgcccaatacgcaaaccgcctctccccgcgcgttggccgattcattaatgcagctggcacgacaggtttcccgactggaaagcgggcagtgagcgcaacgcaattaatgtgagttagctcactcattaggcaccccaggctttacactttatgcttccggctcgtatgttgtgtggaattgtgagcggataacaatttcacacaggaaacagctatgaccatgattacgccaagcgcgcaattaaccctcactaaagggaacaaaagctggagctgcaagcttaatgtagtcttatgcaatactcttgtagtcttgcaacatggtaacgatgagttagcaacatgccttacaaggagagaaaaagcaccgtgcatgccgattggtggaagtaaggtggtacgatcgtgccttattaggaaggcaacagacgggtctgacatggattggacgaaccactgaattgccgcattgcagagatattgtatttaagtgcctagctcgatacataaacgggtctctctggttagaccagatctgagcctgggagctctctggctaactagggaacccactgcttaagcctcaataaagcttgccttgagtgcttcaagtagtgtgtgcccgtctgttgtgtgactctggtaactagagatccctcagacccttttagtcagtgtggaaaatctctagcagtggcgcccgaacagggacttgaaagcgaaagggaaaccagaggagctctctcgacgcaggactcggcttgctgaagcgcgcacggcaagaggcgaggggcggcgactggtgagtacgccaaaaattttgactagcggaggctagaaggagagagatgggtgcgagagcgtcagtattaagcgggggagaattagatcgcgatgggaaaaaattcggttaaggccagggggaaagaaaaaatataaattaaaacatatagtatgggcaagcagggagctagaacgattcgcagttaatcctggcctgttagaaacatcagaaggctgtagacaaatactgggacagctacaaccatcccttcagacaggatcagaagaacttagatcattatataatacagtagcaaccctctattgtgtgcatcaaaggatagagataaaagacaccaaggaagctttagacaagatagaggaagagcaaaacaaaagtaagaccaccgcacagcaagcggccgctgatcttcagacctggaggaggagatatgagggacaattggagaagtgaattatataaatataaagtagtaaaaattgaaccattaggagtagcacccaccaaggcaaagagaagagtggtgcagagagaaaaaagagcagtgggaataggagctttgttccttgggttcttgggagcagcaggaagcactatgggcgcagcgtcaatgacgctgacggtacaggccagacaattattgtctggtatagtgcagcagcagaacaatttgctgagggctattgaggcgcaacagcatctgttgcaactcacagtctggggcatcaagcagctccaggcaagaatcctggctgtggaaagatacctaaaggatcaacagctcctggggatttggggttgctctggaaaactcatttgcaccactgctgtgccttggaatgctagttggagtaataaatctctggaacagatttggaatcacacgacctggatggagtgggacagagaaattaacaattacacaagcttaatacactccttaattgaagaatcgcaaaaccagcaagaaaagaatgaacaagaattattggaattagataaatgggcaagtttgtggaattggtttaacataacaaattggctgtggtatataaaattattcataatgatagtaggaggcttggtaggtttaagaatagtttttgctgtactttctatagtgaatagagttaggcagggatattcaccattatcgtttcagacccacctcccaaccccgaggggacccttgcgccttttccaaggcagccctgggtttgcgcagggacgcggctgctctgggcgtggttccgggaaacgcagcggcgccgaccctgggtctcgcacattcttcacgtccgttcgcagcgtcacccggatcttcgccgctacccttgtgggccccccggcgacgcttcctgctccgcccctaagtcgggaaggttccttgcggttcgcggcgtgccggacgtgacaaacggaagccgcacgtctcactagtaccctcgcagacggacagcgccagggagcaatggcagcgcgccgaccgcgatgggctgtggccaatagcggctgctcagcagggcgcgccgagagcagcggccgggaaggggcggtgcgggaggcggggtgtggggcggtagtgtgggccctgttcctgcccgcgcggtgttccgcattctgcaagcctccggagcgcacgtcggcagtcggctccctcgttgaccgaatcaccgacctctctccccagggggtacccagctgtctagagaattctagatcttgagacaaatggcagtattcatccacaattttaaaagaaaaggggggattggggggtacagtgcaggggaaagaatagtagacataatagcaacagacatacaaactaaagaattacaaaaacaaattacaaaaattcaaaattttcgggtttattacagggacagcagagatccactttggcgccgg

SEQ ID NO: 196 - DNA, 9259 bp, Artificial Sequence
  Synthetic Polynucleotide
cccggggttattaatagtaatcaattacggggtcattagttcatagcccatatatggagttccgcgttacataacttacggtaaatggcccgcctggctgaccgcccaacgacccccgcccattgacgtcaataatgacgtatgttcccatagtaacgccaatagggactttccattgacgtcaatgggtggagtatttacggtaaactgcccacttggcagtacatcaagtgtatcatatgccaagtacgccccctattgacgtcaatgacggtaaatggcccgcctggcattatgcccagtacatgaccttatgggactttcctacttggcagtacatctacgtattagtcatcgctattaccatggtgatgcggttttggcagtacatcaatgggcgtggatagcggtttgactcacggggatttccaagtctccaccccattgacgtcaatgggagtttgttttggcaccaaaatcaacgggactttccaaaatgtcgtaacaactccgccccattgacgcaaatgggcggtaggcgtgtacggtgggaggtctatataagcagagctctctggctaactgtcgggatcaacaagtttgtacaaaaaagcaggctccgaattcgcccttgccgccaccatgccaaaaaaaaaacgcaaagtggtgagcaagggcgaggagctgttcaccggggtggtgcccatcctggtcgagctggacggcgacgtaaacggccacaagttcagcgtgtccggcgagggcgagggcgatgccacctacggcaagctgaccctgaagttcatctgcaccaccggcaagctgcccgtgccctggcccaccctcgtgaccaccctgacctacggcgtgcagtgcttcagccgctaccccgaccacatgaagcagcacgacttcttcaagtccgccatgcccgaaggctacgtccaggagcgcaccatcttcttcaaggacgacggcaactacaagacccgcgccgaggtgaagttcgagggcgacaccctggtgaaccgcatcgagctgaagggcatcgacttcaaggaggacggcaacatcctggggcacaagctggagtacaactacaacagccacaacgtctatatcatggccgacaagcagaagaacggcatcaaggtgaacttcaagatccgccacaacatcgaggacggcagcgtgcagctcgccgaccactaccagcagaacacccccatcggcgacggccccgtgctgctgcccgacaaccactacctgagcacccagtccgccctgagcaaagaccccaacgagaagcgcgatcacatggtcctgctggagttcgtgaccgccgccgggatcactctcggcatggacgagctgtacaagtaaaagggcgaattcgacccagctttcttgtacaaagtggttggtaagcctatccctaaccctctcctcggtctcgattctacgtagtaatgagctagcagtctcgaggttaacgaattccgccccccccctaacgttactggccgaagccgcttggaataaggccggtgtgcgcttgtctatatgttattttccaccatattgccgtcttttggcaatgtgagggcccggaaacctggccctgtcttcttgacgagcattcctaggggtctttcccctctcgccaaaggaatgcaaggtctgttgaatgtcgtgaaggaagcagttcctctggaagcttcttgaagacaaacaacgtctgtagcgaccctttgcaggcagcggaaccccccacctggcgacaggtgcccctgcggccaaaagccacgtgtataagatacacctgcaaaggcggcacaaccccagtgccacgttgtgagttggatagttgtggaaagagtcaaatggctctcctcaagcgtattcaacaaggggctgaaggatgcccagaaggtaccccattgtatgggatctgatctggggcctcggtgcacatgctttacatgtgtttagtcgaggttaaaaaaacgtctaggccccccgaaccacggggacgtggttttcctttgaaaaacacgataataccatggccatgaaaaagcctgaactcaccgcgacgtctgtcgagaagtttctgatcgaaaagttcgacagcgtctccgacctgatgcagctctcggagggcgaagaatctcgtgctttcagcttcgatgtaggagggcgtggatatgtcctgcgggtaaatagctgcgccgatggtttctacaaagatcgttatgtttatcggcactttgcatcggccgcgctcccgattccggaagtgcttgacattggggaatttagcgagagcctgacctattgcctttcatacgagaccgagatcctgactgtcgagtacggattgcttcctatcggcaaaatcgtggagaagaggattgaatgtaccgtctattcagtcgataataatgggaacatctacacacagcccgtggctcaatggcacgacagaggagagcaggaagtttttgaatactgtctcgaggacggatccctcatccgcgctactaaagatcataagtttatgaccgtggacggccagatgctgccaattgacgaaatttttgaacgagagctggatctgatgagagtcgacaaccttccaaactgacaccggtggcgcgttaagtcgacaatcaacctctggattacaaaatttgtgaaagattgactggtattcttaactatgttgctccttttacgctatgtggatacgctgctttaatgcctttgtatcatgctattgcttcccgtatggctttcattttctcctccttgtataaatcctggttgctgtctctttatgaggagttgtggcccgttgtcaggcaacgtggcgtggtgtgcactgtgtttgctgacgcaacccccactggttggggcattgccaccacctgtcagctcctttccgggactttcgctttccccctccctattgccacggcggaactcatcgccgcctgccttgcccgctgctggacaggggctcggctgttgggcactgacaattccgtggtgttgtcggggaaatcatcgtcctttccttggctgctcgcctgtgttgccacctggattctgcgcgggacgtccttctgctacgtcccttcggccctcaatccagcggaccttccttcccgcggcctgctgccggctctgcggcctcttccgcgtcttcgccttcgccctcagacgagtcggatctccctttgggccgcctccccgcgtcgactttaagaccaatgacttacaaggcagctgtagatcttagccactttttaaaagaaaaggggggactggaagggctaattcactcccaacgaagacaagatctgctttttgcttgtactgggtctctctggttagaccagatctgagcctgggagctctctggctaactagggaacccactgcttaagcctcaataaagcttgccttgagtgcttcaagtagtgtgtgcccgtctgttgtgtgactctggtaactagagatccctcagacccttttagtcagtgtggaaaatctctagcagtacgtatagtagttcatgtcatcttattattcagtatttataacttgcaaagaaatgaatatcagagagtgagaggaacttgtttattgcagcttataatggttacaaataaagcaatagcatcacaaatttcacaaataaagcatttttttcactgcattctagttgtggtttgtccaaactcatcaatgtatcttatcatgtctggctctagctatcccgcccctaactccgcccatcccgcccctaactccgcccagttccgcccattctccgccccatggctgactaattttttttatttatgcagaggccgaggccgcctcggcctctgagctattccagaagtagtgaggaggcttttttggaggcctagggacgtacccaattcgccctatagtgagtcgtattacgcgcgctcactggccgtcgttttacaacgtcgtgactgggaaaaccctggcgttacccaacttaatcgccttgcagcacatccccctttcgccagctggcgtaatagcgaagaggcccgcaccgatcgcccttcccaacagttgcgcagcctgaatggcgaatgggacgcgccctgtagcggcgcattaagcgcggcgggtgtggtggttacgcgcagcgtgaccgctacacttgccagcgccctagcgcccgctcctttcgctttcttcccttcctttctcgccacgttcgccggctttccccgtcaagctctaaatcgggggctccctttagggttccgatttagtgctttacggcacctcgaccccaaaaaacttgattagggtgatggttcacgtagtgggccatcgccctgatagacggtttttcgccctttgacgttggagtccacgttctttaatagtggactcttgttccaaactggaacaacactcaaccctatctcggtctattcttttgatttataagggattttgccgatttcggcctattggttaaaaaatgagctgatttaacaaaaatttaacgcgaattttaacaaaatattaacgcttacaatttaggtggcacttttcggggaaatgtgcgcggaacccctatttgtttatttttctaaatacattcaaatatgtatccgctcatgagacaataaccctgataaatgcttcaataatattgaaaaaggaagagtatgagtattcaacatttccgtgtcgcccttattcccttttttgcggcattttgccttcctgtttttgctcacccagaaacgctggtgaaagtaaaagatgctgaagatcagttgggtgcacgagtgggttacatcgaactggatctcaacagcggtaagatccttgagagttttcgccccgaagaacgttttccaatgatgagcacttttaaagttctgctatgtggcgcggtattatcccgtattgacgccgggcaagagcaactcggtcgccgcatacactattctcagaatgacttggttgagtactcaccagtcacagaaaagcatcttacggatggcatgacagtaagagaattatgcagtgctgccataaccatgagtgataacactgcggccaacttacttctgacaacgatcggaggaccgaaggagctaaccgcttttttgcacaacatgggggatcatgtaactcgccttgatcgttgggaaccggagctgaatgaagccataccaaacgacgagcgtgacaccacgatgcctgtagcaatggcaacaacgttgcgcaaactattaactggcgaactacttactctagcttcccggcaacaattaatagactggatggaggcggataaagttgcaggaccacttctgcgctcggcccttccggctggctggtttattgctgataaatctggagccggtgagcgtgggtctcgcggtatcattgcagcactggggccagatggtaagccctcccgtatcgtagttatctacacgacggggagtcaggcaactatggatgaacgaaatagacagatcgctgagataggtgcctcactgattaagcattggtaactgtcagaccaagtttactcatatatactttagattgatttaaaacttcatttttaatttaaaaggatctaggtgaagatcctttttgataatctcatgaccaaaatcccttaacgtgagttttcgttccactgagcgtcagaccccgtagaaaagatcaaaggatcttcttgagatcctttttttctgcgcgtaatctgctgcttgcaaacaaaaaaaccaccgctaccagcggtggtttgtttgccggatcaagagctaccaactctttttccgaaggtaactggcttcagcagagcgcagataccaaatactgttcttctagtgtagccgtagttaggccaccacttcaagaactctgtagcaccgcctacatacctcgctctgctaatcctgttaccagtggctgctgccagtggcgataagtcgtgtcttaccgggttggactcaagacgatagttaccggataaggcgcagcggtcgggctgaacggggggttcgtgcacacagcccagcttggagcgaacgacctacaccgaactgagatacctacagcgtgagctatgagaaagcgccacgcttcccgaagggagaaaggcggacaggtatccggtaagcggcagggtcggaacaggagagcgcacgagggagcttccagggggaaacgcctggtatctttatagtcctgtcgggtttcgccacctctgacttgagcgtcgatttttgtgatgctcgtcaggggggcggagcctatggaaaaacgccagcaacgcggcctttttacggttcctggccttttgctggccttttgctcacatgttctttcctgcgttatcccctgattctgtggataaccgtattaccgcctttgagtgagctgataccgctcgccgcagccgaacgaccgagcgcagcgagtcagtgagcgaggaagcggaagagcgcccaatacgcaaaccgcctctccccgcgcgttggccgattcattaatgcagctggcacgacaggtttcccgactggaaagcgggcagtgagcgcaacgcaattaatgtgagttagctcactcattaggcaccccaggctttacactttatgcttccggctcgtatgttgtgtggaattgtgagcggataacaatttcacacaggaaacagctatgaccatgattacgccaagcgcgcaattaaccctcactaaagggaacaaaagctggagctgcaagcttaatgtagtcttatgcaatactcttgtagtcttgcaacatggtaacgatgagttagcaacatgccttacaaggagagaaaaagcaccgtgcatgccgattggtggaagtaaggtggtacgatcgtgccttattaggaaggcaacagacgggtctgacatggattggacgaaccactgaattgccgcattgcagagatattgtatttaagtgcctagctcgatacataaacgggtctctctggttagaccagatctgagcctgggagctctctggctaactagggaacccactgcttaagcctcaataaagcttgccttgagtgcttcaagtagtgtgtgcccgtctgttgtgtgactctggtaactagagatccctcagacccttttagtcagtgtggaaaatctctagcagtggcgcccgaacagggacttgaaagcgaaagggaaaccagaggagctctctcgacgcaggactcggcttgctgaagcgcgcacggcaagaggcgaggggcggcgactggtgagtacgccaaaaattttgactagcggaggctagaaggagagagatgggtgcgagagcgtcagtattaagcgggggagaattagatcgcgatgggaaaaaattcggttaaggccagggggaaagaaaaaatataaattaaaacatatagtatgggcaagcagggagctagaacgattcgcagttaatcctggcctgttagaaacatcagaaggctgtagacaaatactgggacagctacaaccatcccttcagacaggatcagaagaacttagatcattatataatacagtagcaaccctctattgtgtgcatcaaaggatagagataaaagacaccaaggaagctttagacaagatagaggaagagcaaaacaaaagtaagaccaccgcacagcaagcggccgctgatcttcagacctggaggaggagatatgagggacaattggagaagtgaattatataaatataaagtagtaaaaattgaaccattaggagtagcacccaccaaggcaaagagaagagtggtgcagagagaaaaaagagcagtgggaataggagctttgttccttgggttcttgggagcagcaggaagcactatgggcgcagcgtcaatgacgctgacggtacaggccagacaattattgtctggtatagtgcagcagcagaacaatttgctgagggctattgaggcgcaacagcatctgttgcaactcacagtctggggcatcaagcagctccaggcaagaatcctggctgtggaaagatacctaaaggatcaacagctcctggggatttggggttgctctggaaaactcatttgcaccactgctgtgccttggaatgctagttggagtaataaatctctggaacagatttggaatcacacgacctggatggagtgggacagagaaattaacaattacacaagcttaatacactccttaattgaagaatcgcaaaaccagcaagaaaagaatgaacaagaattattggaattagataaatgggcaagtttgtggaattggtttaacataacaaattggctgtggtatataaaattattcataatgatagtaggaggcttggtaggtttaagaatagtttttgctgtactttctatagtgaatagagttaggcagggatattcaccattatcgtttcagacccacctcccaaccccgaggggacccttgcgccttttccaaggcagccctgggtttgcgcagggacgcggctgctctgggcgtggttccgggaaacgcagcggcgccgaccctgggtctcgcacattcttcacgtccgttcgcagcgtcacccggatcttcgccgctacccttgtgggccccccggcgacgcttcctgctccgcccctaagtcgggaaggttccttgcggttcgcggcgtgccggacgtgacaaacggaagccgcacgtctcactagtaccctcgcagacggacagcgccagggagcaatggcagcgcgccgaccgcgatgggctgtggccaatagcggctgctcagcagggcgcgccgagagcagcggccgggaaggggcggtgcgggaggcggggtgtggggcggtagtgtgggccctgttcctgcccgcgcggtgttccgcattctgcaagcctccggagcgcacgtcggcagtcggctccctcgttgaccgaatcaccgacctctctccccagggggtacccagctgtctagagaattctagatcttgagacaaatggcagtattcatccacaattttaaaagaaaaggggggattggggggtacagtgcaggggaaagaatagtagacataatagcaacagacatacaaactaaagaattacaaaaacaaattacaaaaattcaaaattttcgggtttattacagggacagcagagatccactttggcgccggctcgaggggg

SEQ ID NO: 197 - DNA, 9620 bp, Artificial Sequence
  Synthetic Polynucleotide
cccggggttattaatagtaatcaattacggggtcattagttcatagcccatatatggagttccgcgttacataacttacggtaaatggcccgcctggctgaccgcccaacgacccccgcccattgacgtcaataatgacgtatgttcccatagtaacgccaatagggactttccattgacgtcaatgggtggagtatttacggtaaactgcccacttggcagtacatcaagtgtatcatatgccaagtacgccccctattgacgtcaatgacggtaaatggcccgcctggcattatgcccagtacatgaccttatgggactttcctacttggcagtacatctacgtattagtcatcgctattaccatggtgatgcggttttggcagtacatcaatgggcgtggatagcggtttgactcacggggatttccaagtctccaccccattgacgtcaatgggagtttgttttggcaccaaaatcaacgggactttccaaaatgtcgtaacaactccgccccattgacgcaaatgggcggtaggcgtgtacggtgggaggtctatataagcagagctctctggctaactgtcgggatcaacaagtttgtacaaaaaagcaggctccgaattcaccggtctagcgctaccggactcagatctcgagctcaagcttcgaattccaccatgggcgtggccgacctgatcaagaagttcgagagcatcagcaaggaggagggggatccaccggtcgccaccatggtgagcaagggcgaggcagtgatcaaggagttcatgcggttcaaggtgcacatggagggctccatgaacggccacgagttcgagatcgagggcgagggcgagggccgcccctacgagggcacccagaccgccaagctgaaggtgaccaagggtggccccctgcccttctcctgggacatcctgtcccctcagttcatgtacggctccagggccttcaccaagcaccccgccgacatccccgactactataagcagtccttccccgagggcttcaagtgggagcgcgtgatgaacttcgaggacggcggcgccgtgaccgtgacccaggacacctccctggaggacggcaccctgatctacaaggtgaagctccgcggcaccaacttccctcctgacggccccgtaatgcagaagaagacaatgggctgggaagcgtccaccgagcggttgtaccccgaggacggcgtgctgaagggcgacattaagatggccctgcgcctgaaggacggcggccgctacctggcggacttcaagaccacctacaaggccaagaagcccgtgcagatgcccggcgcctacaacgtcgaccgcaagttggacatcacctcccacaacgaggactacaccgtggtggaacagtacgaacgctccgagggccgccactccaccggcggcatggacgagctgtacaagtaattaattaagaattcgacccagctttcttgtacaaagtggttggtaagcctatccctaaccctctcctcggtctcgattctacgtagtaatgagctagcagtctcgaggttaacgaattccgccccccccctaacgttactggccgaagccgcttggaataaggccggtgtgcgcttgtctatatgttattttccaccatattgccgtcttttggcaatgtgagggcccggaaacctggccctgtcttcttgacgagcattcctaggggtctttcccctctcgccaaaggaatgcaaggtctgttgaatgtcgtgaaggaagcagttcctctggaagcttcttgaagacaaacaacgtctgtagcgaccctttgcaggcagcggaaccccccacctggcgacaggtgcccctgcggccaaaagccacgtgtataagatacacctgcaaaggcggcacaaccccagtgccacgttgtgagttggatagttgtggaaagagtcaaatggctctcctcaagcgtattcaacaaggggctgaaggatgcccagaaggtaccccattgtatgggatctgatctggggcctcggtgcacatgctttacatgtgtttagtcgaggttaaaaaaacgtctaggccccccgaaccacggggacgtggttttcctttgaaaaacacgataataccatggccatgattaagatcgctacgcggaagtacctggggaaacagaacgtctacgacataggtgtggagcgcgatcacaactttgctctgaaaaatggatttatcgccagcaactgcatctcccgccgtgcacagggtgtcacgttgcaagacctgcctgaaaccgaactgcccgctgttctgcagccggtcgcggaggccatggatgcgatcgctgcggccgatcttagccagacgagcgggttcggcccattcggaccgcaaggaatcggtcaatacactacatggcgtgatttcatatgcgcgattgctgatccccatgtgtatcactggcaaactgtgatggacgacaccgtcagtgcgtccgtcgcgcaggctctcgatgagctgatgctttgggccgaggactgccccgaagtccggcacctcgtgcacgcggatttcggctccaacaatgtcctgacggacaatggccgcataacagcggtcattgactggagcgaggcgatgttcggggattcccaatacgaggtcgccaacatcttcttctggaggccgtggttggcttgtatggagcagcagacgcgctacttcgagcggaggcatccggagcttgcaggatcgccgcggctccgggcgtatatgctccgcattggtcttgaccaactctatcagagcttggttgacggcaatttcgatgatgcagcttgggcgcagggtcgatgcgacgcaatcgtccgatccggagccgggactgtcgggcgtacacaaatcgcccgcagaagcgcggccgtctggaccgatggctgtgtagaagtactcgccgatagtggaaaccgacgccccagcactcgtccgagggcaaaggaatagcaccggtggcgcgttaagtcgacaatcaacctctggattacaaaatttgtgaaagattgactggtattcttaactatgttgctccttttacgctatgtggatacgctgctttaatgcctttgtatcatgctattgcttcccgtatggctttcattttctcctccttgtataaatcctggttgctgtctctttatgaggagttgtggcccgttgtcaggcaacgtggcgtggtgtgcactgtgtttgctgacgcaacccccactggttggggcattgccaccacctgtcagctcctttccgggactttcgctttccccctccctattgccacggcggaactcatcgccgcctgccttgcccgctgctggacaggggctcggctgttgggcactgacaattccgtggtgttgtcggggaaatcatcgtcctttccttggctgctcgcctgtgttgccacctggattctgcgcgggacgtccttctgctacgtcccttcggccctcaatccagcggaccttccttcccgcggcctgctgccggctctgcggcctcttccgcgtcttcgccttcgccctcagacgagtcggatctccctttgggccgcctccccgcgtcgactttaagaccaatgacttacaaggcagctgtagatcttagccactttttaaaagaaaaggggggactggaagggctaattcactcccaacgaagacaagatctgctttttgcttgtactgggtctctctggttagaccagatctgagcctgggagctctctggctaactagggaacccactgcttaagcctcaataaagcttgccttgagtgcttcaagtagtgtgtgcccgtctgttgtgtgactctggtaactagagatccctcagacccttttagtcagtgtggaaaatctctagcagtacgtatagtagttcatgtcatcttattattcagtatttataacttgcaaagaaatgaatatcagagagtgagaggaacttgtttattgcagcttataatggttacaaataaagcaatagcatcacaaatttcacaaataaagcatttttttcactgcattctagttgtggtttgtccaaactcatcaatgtatcttatcatgtctggctctagctatcccgcccctaactccgcccatcccgcccctaactccgcccagttccgcccattctccgccccatggctgactaattttttttatttatgcagaggccgaggccgcctcggcctctgagctattccagaagtagtgaggaggcttttttggaggcctagggacgtacccaattcgccctatagtgagtcgtattacgcgcgctcactggccgtcgttttacaacgtcgtgactgggaaaaccctggcgttacccaacttaatcgccttgcagcacatccccctttcgccagctggcgtaatagcgaagaggcccgcaccgatcgcccttcccaacagttgcgcagcctgaatggcgaatgggacgcgccctgtagcggcgcattaagcgcggcgggtgtggtggttacgcgcagcgtgaccgctacacttgccagcgccctagcgcccgctcctttcgctttcttcccttcctttctcgccacgttcgccggctttccccgtcaagctctaaatcgggggctccctttagggttccgatttagtgctttacggcacctcgaccccaaaaaacttgattagggtgatggttcacgtagtgggccatcgccctgatagacggtttttcgccctttgacgttggagtccacgttctttaatagtggactcttgttccaaactggaacaacactcaaccctatctcggtctattcttttgatttataagggattttgccgatttcggcctattggttaaaaaatgagctgatttaacaaaaatttaacgcgaattttaacaaaatattaacgcttacaatttaggtggcacttttcggggaaatgtgcgcggaacccctatttgtttatttttctaaatacattcaaatatgtatccgctcatgagacaataaccctgataaatgcttcaataatattgaaaaaggaagagtatgagtattcaacatttccgtgtcgcccttattcccttttttgcggcattttgccttcctgtttttgctcacccagaaacgctggtgaaagtaaaagatgctgaagatcagttgggtgcacgagtgggttacatcgaactggatctcaacagcggtaagatccttgagagttttcgccccgaagaacgttttccaatgatgagcacttttaaagttctgctatgtggcgcggtattatcccgtattgacgccgggcaagagcaactcggtcgccgcatacactattctcagaatgacttggttgagtactcaccagtcacagaaaagcatcttacggatggcatgacagtaagagaattatgcagtgctgccataaccatgagtgataacactgcggccaacttacttctgacaacgatcggaggaccgaaggagctaaccgcttttttgcacaacatgggggatcatgtaactcgccttgatcgttgggaaccggagctgaatgaagccataccaaacgacgagcgtgacaccacgatgcctgtagcaatggcaacaacgttgcgcaaactattaactggcgaactacttactctagcttcccggcaacaattaatagactggatggaggcggataaagttgcaggaccacttctgcgctcggcccttccggctggctggtttattgctgataaatctggagccggtgagcgtgggtctcgcggtatcattgcagcactggggccagatggtaagccctcccgtatcgtagttatctacacgacggggagtcaggcaactatggatgaacgaaatagacagatcgctgagataggtgcctcactgattaagcattggtaactgtcagaccaagtttactcatatatactttagattgatttaaaacttcatttttaatttaaaaggatctaggtgaagatcctttttgataatctcatgaccaaaatcccttaacgtgagttttcgttccactgagcgtcagaccccgtagaaaagatcaaaggatcttcttgagatcctttttttctgcgcgtaatctgctgcttgcaaacaaaaaaaccaccgctaccagcggtggtttgtttgccggatcaagagctaccaactctttttccgaaggtaactggcttcagcagagcgcagataccaaatactgttcttctagtgtagccgtagttaggccaccacttcaagaactctgtagcaccgcctacatacctcgctctgctaatcctgttaccagtggctgctgccagtggcgataagtcgtgtcttaccgggttggactcaagacgatagttaccggataaggcgcagcggtcgggctgaacggggggttcgtgcacacagcccagcttggagcgaacgacctacaccgaactgagatacctacagcgtgagctatgagaaagcgccacgcttcccgaagggagaaaggcggacaggtatccggtaagcggcagggtcggaacaggagagcgcacgagggagcttccagggggaaacgcctggtatctttatagtcctgtcgggtttcgccacctctgacttgagcgtcgatttttgtgatgctcgtcaggggggcggagcctatggaaaaacgccagcaacgcggcctttttacggttcctggccttttgctggccttttgctcacatgttctttcctgcgttatcccctgattctgtggataaccgtattaccgcctttgagtgagctgataccgctcgccgcagccgaacgaccgagcgcagcgagtcagtgagcgaggaagcggaagagcgcccaatacgcaaaccgcctctccccgcgcgttggccgattcattaatgcagctggcacgacaggtttcccgactggaaagcgggcagtgagcgcaacgcaattaatgtgagttagctcactcattaggcaccccaggctttacactttatgcttccggctcgtatgttgtgtggaattgtgagcggataacaatttcacacaggaaacagctatgaccatgattacgccaagcgcgcaattaaccctcactaaagggaacaaaagctggagctgcaagcttaatgtagtcttatgcaatactcttgtagtcttgcaacatggtaacgatgagttagcaacatgccttacaaggagagaaaaagcaccgtgcatgccgattggtggaagtaaggtggtacgatcgtgccttattaggaaggcaacagacgggtctgacatggattggacgaaccactgaattgccgcattgcagagatattgtatttaagtgcctagctcgatacataaacgggtctctctggttagaccagatctgagcctgggagctctctggctaactagggaacccactgcttaagcctcaataaagcttgccttgagtgcttcaagtagtgtgtgcccgtctgttgtgtgactctggtaactagagatccctcagacccttttagtcagtgtggaaaatctctagcagtggcgcccgaacagggacttgaaagcgaaagggaaaccagaggagctctctcgacgcaggactcggcttgctgaagcgcgcacggcaagaggcgaggggcggcgactggtgagtacgccaaaaattttgactagcggaggctagaaggagagagatgggtgcgagagcgtcagtattaagcgggggagaattagatcgcgatgggaaaaaattcggttaaggccagggggaaagaaaaaatataaattaaaacatatagtatgggcaagcagggagctagaacgattcgcagttaatcctggcctgttagaaacatcagaaggctgtagacaaatactgggacagctacaaccatcccttcagacaggatcagaagaacttagatcattatataatacagtagcaaccctctattgtgtgcatcaaaggatagagataaaagacaccaaggaagctttagacaagatagaggaagagcaaaacaaaagtaagaccaccgcacagcaagcggccgctgatcttcagacctggaggaggagatatgagggacaattggagaagtgaattatataaatataaagtagtaaaaattgaaccattaggagtagcacccaccaaggcaaagagaagagtggtgcagagagaaaaaagagcagtgggaataggagctttgttccttgggttcttgggagcagcaggaagcactatgggcgcagcgtcaatgacgctgacggtacaggccagacaattattgtctggtatagtgcagcagcagaacaatttgctgagggctattgaggcgcaacagcatctgttgcaactcacagtctggggcatcaagcagctccaggcaagaatcctggctgtggaaagatacctaaaggatcaacagctcctggggatttggggttgctctggaaaactcatttgcaccactgctgtgccttggaatgctagttggagtaataaatctctggaacagatttggaatcacacgacctggatggagtgggacagagaaattaacaattacacaagcttaatacactccttaattgaagaatcgcaaaaccagcaagaaaagaatgaacaagaattattggaattagataaatgggcaagtttgtggaattggtttaacataacaaattggctgtggtatataaaattattcataatgatagtaggaggcttggtaggtttaagaatagtttttgctgtactttctatagtgaatagagttaggcagggatattcaccattatcgtttcagacccacctcccaaccccgaggggacccttgcgccttttccaaggcagccctgggtttgcgcagggacgcggctgctctgggcgtggttccgggaaacgcagcggcgccgaccctgggtctcgcacattcttcacgtccgttcgcagcgtcacccggatcttcgccgctacccttgtgggccccccggcgacgcttcctgctccgcccctaagtcgggaaggttccttgcggttcgcggcgtgccggacgtgacaaacggaagccgcacgtctcactagtaccctcgcagacggacagcgccagggagcaatggcagcgcgccgaccgcgatgggctgtggccaatagcggctgctcagcagggcgcgccgagagcagcggccgggaaggggcggtgcgggaggcggggtgtggggcggtagtgtgggccctgttcctgcccgcgcggtgttccgcattctgcaagcctccggagcgcacgtcggcagtcggctccctcgttgaccgaatcaccgacctctctccccagggggtacccagctgtctagagaattctagatcttgagacaaatggcagtattcatccacaattttaaaagaaaaggggggattggggggtacagtgcaggggaaagaatagtagacataatagcaacagacatacaaactaaagaattacaaaaacaaattacaaaaattcaaaattttcgggtttattacagggacagcagagatccactttggcgccggctcgaggggg

SEQ ID NO: 198 - DNA, 21 bp, Artificial Sequence
  Synthetic Polynucleotide
gaccccacagtggggccacta

SEQ ID NO: 199 - DNA, 8509 bp, Artificial Sequence
  Synthetic Polynucleotide
gagggcctatttcccatgattccttcatatttgcatatacgatacaaggctgttagagagataattggaattaatttgactgtaaacacaaagatattagtacaaaatacgtgacgtagaaagtaataatttcttgggtagtttgcagttttaaaattatgttttaaaatggactatcatatgcttaccgtaacttgaaagtatttcgatttcttggctttatatatcttgtggaaaggacgaaacaccgaccccacagtggggccactagttttagagctagaaatagcaagttaaaataaggctagtccgttatcaacttgaaaaagtggcaccgagtcggtgcttttttgttttagagctagaaatagcaagttaaaataaggctagtccgtttttagcgcgtgcgccaattctgcagacaaatggctctagaggtacccgttacataacttacggtaaatggcccgcctggctgaccgcccaacgacccccgcccattgacgtcaatagtaacgccaatagggactttccattgacgtcaatgggtggagtatttacggtaaactgcccacttggcagtacatcaagtgtatcatatgccaagtacgccccctattgacgtcaatgacggtaaatggcccgcctggcattgtgcccagtacatgaccttatgggactttcctacttggcagtacatctacgtattagtcatcgctattaccatggtcgaggtgagccccacgttctgcttcactctccccatctcccccccctccccacccccaattttgtatttatttattttttaattattttgtgcagcgatgggggcggggggggggggggggcgcgcgccaggcggggcggggcggggcgaggggcggggcggggcgaggcggagaggtgcggcggcagccaatcagagcggcgcgctccgaaagtttccttttatggcgaggcggcggcggcggcggccctataaaaagcgaagcgcgcggcgggcgggagtcgctgcgacgctgccttcgccccgtgccccgctccgccgccgcctcgcgccgcccgccccggctctgactgaccgcgttactcccacaggtgagcgggcgggacggcccttctcctccgggctgtaattagctgagcaagaggtaagggtttaagggatggttggttggtggggtattaatgtttaattacctggagcacctgcctgaaatcactttttttcaggttggaccggtgccaccatggactataaggaccacgacggagactacaaggatcatgatattgattacaaagacgatgacgataagatggccccaaagaagaagcggaaggtcggtatccacggagtcccagcagccgacaagaagtacagcatcggcctggacatcggcaccaactctgtgggctgggccgtgatcaccgacgagtacaaggtgcccagcaagaaattcaaggtgctgggcaacaccgaccggcacagcatcaagaagaacctgatcggagccctgctgttcgacagcggcgaaacagccgaggccacccggctgaagagaaccgccagaagaagatacaccagacggaagaaccggatctgctatctgcaagagatcttcagcaacgagatggccaaggtggacgacagcttcttccacagactggaagagtccttcctggtggaagaggataagaagcacgagcggcaccccatcttcggcaacatcgtggacgaggtggcctaccacgagaagtaccccaccatctaccacctgagaaagaaactggtggacagcaccgacaaggccgacctgcggctgatctatctggccctggcccacatgatcaagttccggggccacttcctgatcgagggcgacctgaaccccgacaacagcgacgtggacaagctgttcatccagctggtgcagacctacaaccagctgttcgaggaaaaccccatcaacgccagcggcgtggacgccaaggccatcctgtctgccagactgagcaagagcagacggctggaaaatctgatcgcccagctgcccggcgagaagaagaatggcctgttcggaaacctgattgccctgagcctgggcctgacccccaacttcaagagcaacttcgacctggccgaggatgccaaactgcagctgagcaaggacacctacgacgacgacctggacaacctgctggcccagatcggcgaccagtacgccgacctgtttctggccgccaagaacctgtccgacgccatcctgctgagcgacatcctgagagtgaacaccgagatcaccaaggcccccctgagcgcctctatgatcaagagatacgacgagcaccaccaggacctgaccctgctgaaagctctcgtgcggcagcagctgcctgagaagtacaaagagattttcttcgaccagagcaagaacggctacgccggctacattgacggcggagccagccaggaagagttctacaagttcatcaagcccatcctggaaaagatggacggcaccgaggaactgctcgtgaagctgaacagagaggacctgctgcggaagcagcggaccttcgacaacggcagcatcccccaccagatccacctgggagagctgcacgccattctgcggcggcaggaagatttttacccattcctgaaggacaaccgggaaaagatcgagaagatcctgaccttccgcatcccctactacgtgggccctctggccaggggaaacagcagattcgcctggatgaccagaaagagcgaggaaaccatcaccccctggaacttcgaggaagtggtggacaagggcgcttccgcccagagcttcatcgagcggatgaccaacttcgataagaacctgcccaacgagaaggtgctgcccaagcacagcctgctgtacgagtacttcaccgtgtataacgagctgaccaaagtgaaatacgtgaccgagggaatgagaaagcccgccttcctgagcggcgagcagaaaaaggccatcgtggacctgctgttcaagaccaaccggaaagtgaccgtgaagcagctgaaagaggactacttcaagaaaatcgagtgcttcgactccgtggaaatctccggcgtggaagatcggttcaacgcctccctgggcacataccacgatctgctgaaaattatcaaggacaaggacttcctggacaatgaggaaaacgaggacattctggaagatatcgtgctgaccctgacactgtttgaggacagagagatgatcgaggaacggctgaaaacctatgcccacctgttcgacgacaaagtgatgaagcagctgaagcggcggagatacaccggctggggcaggctgagccggaagctgatcaacggcatccgggacaagcagtccggcaagacaatcctggatttcctgaagtccgacggcttcgccaacagaaacttcatgcagctgatccacgacgacagcctgacctttaaagaggacatccagaaagcccaggtgtccggccagggcgatagcctgcacgagcacattgccaatctggccggcagccccgccattaagaagggcatcctgcagacagtgaaggtggtggacgagctcgtgaaagtgatgggccggcacaagcccgagaacatcgtgatcgaaatggccagagagaaccagaccacccagaagggacagaagaacagccgcgagagaatgaagcggatcgaagagggcatcaaagagctgggcagccagatcctgaaagaacaccccgtggaaaacacccagctgcagaacgagaagctgtacctgtactacctgcagaatgggcgggatatgtacgtggaccaggaactggacatcaaccggctgtccgactacgatgtggaccatatcgtgcctcagagctttctgaaggacgactccatcgacaacaaggtgctgaccagaagcgacaagaaccggggcaagagcgacaacgtgccctccgaagaggtcgtgaagaagatgaagaactactggcggcagctgctgaacgccaagctgattacccagagaaagttcgacaatctgaccaaggccgagagaggcggcctgagcgaactggataaggccggcttcatcaagagacagctggtggaaacccggcagatcacaaagcacgtggcacagatcctggactcccggatgaacactaagtacgacgagaatgacaagctgatccgggaagtgaaagtgatcaccctgaagtccaagctggtgtccgatttccggaaggatttccagttttacaaagtgcgcgagatcaacaactaccaccacgcccacgacgcctacctgaacgccgtcgtgggaaccgccctgatcaaaaagtaccctaagctggaaagcgagttcgtgtacggcgactacaaggtgtacgacgtgcggaagatgatcgccaagagcgagcaggaaatcggcaaggctaccgccaagtacttcttctacagcaacatcatgaactttttcaagaccgagattaccctggccaacggcgagatccggaagcggcctctgatcgagacaaacggcgaaaccggggagatcgtgtgggataagggccgggattttgccaccgtgcggaaagtgctgagcatgccccaagtgaatatcgtgaaaaagaccgaggtgcagacaggcggcttcagcaaagagtctatcctgcccaagaggaacagcgataagctgatcgccagaaagaaggactgggaccctaagaagtacggcggcttcgacagccccaccgtggcctattctgtgctggtggtggccaaagtggaaaagggcaagtccaagaaactgaagagtgtgaaagagctgctggggatcaccatcatggaaagaagcagcttcgagaagaatcccatcgactttctggaagccaagggctacaaagaagtgaaaaaggacctgatcatcaagctgcctaagtactccctgttcgagctggaaaacggccggaagagaatgctggcctctgccggcgaactgcagaagggaaacgaactggccctgccctccaaatatgtgaacttcctgtacctggccagccactatgagaagctgaagggctcccccgaggataatgagcagaaacagctgtttgtggaacagcacaagcactacctggacgagatcatcgagcagatcagcgagttctccaagagagtgatcctggccgacgctaatctggacaaagtgctgtccgcctacaacaagcaccgggataagcccatcagagagcaggccgagaatatcatccacctgtttaccctgaccaatctgggagcccctgccgccttcaagtactttgacaccaccatcgaccggaagaggtacaccagcaccaaagaggtgctggacgccaccctgatccaccagagcatcaccggcctgtacgagacacggatcgacctgtctcagctgggaggcgacaaaaggccggcggccacgaaaaaggccggccaggcaaaaaagaaaaagtaagaattcctagagctcgctgatcagcctcgactgtgccttctagttgccagccatctgttgtttgcccctcccccgtgccttccttgaccctggaaggtgccactcccactgtcctttcctaataaaatgaggaaattgcatcgcattgtctgagtaggtgtcattctattctggggggtggggtggggcaggacagcaagggggaggattgggaagagaatagcaggcatgctggggagcggccgcaggaacccctagtgatggagttggccactccctctctgcgcgctcgctcgctcactgaggccgggcgaccaaaggtcgcccgacgcccgggctttgcccgggcggcctcagtgagcgagcgagcgcgcagctgcctgcaggggcgcctgatgcggtattttctccttacgcatctgtgcggtatttcacaccgcatacgtcaaagcaaccatagtacgcgccctgtagcggcgcattaagcgcggcgggtgtggtggttacgcgcagcgtgaccgctacacttgccagcgccctagcgcccgctcctttcgctttcttcccttcctttctcgccacgttcgccggctttccccgtcaagctctaaatcgggggctccctttagggttccgatttagtgctttacggcacctcgaccccaaaaaacttgatttgggtgatggttcacgtagtgggccatcgccctgatagacggtttttcgccctttgacgttggagtccacgttctttaatagtggactcttgttccaaactggaacaacactcaaccctatctcgggctattcttttgatttataagggattttgccgatttcggcctattggttaaaaaatgagctgatttaacaaaaatttaacgcgaattttaacaaaatattaacgtttacaattttatggtgcactctcagtacaatctgctctgatgccgcatagttaagccagccccgacacccgccaacacccgctgacgcgccctgacgggcttgtctgctcccggcatccgcttacagacaagctgtgaccgtctccgggagctgcatgtgtcagaggttttcaccgtcatcaccgaaacgcgcgagacgaaagggcctcgtgatacgcctatttttataggttaatgtcatgataataatggtttcttagacgtcaggtggcacttttcggggaaatgtgcgcggaacccctatttgtttatttttctaaatacattcaaatatgtatccgctcatgagacaataaccctgataaatgcttcaataatattgaaaaaggaagagtatgagtattcaacatttccgtgtcgcccttattcccttttttgcggcattttgccttcctgtttttgctcacccagaaacgctggtgaaagtaaaagatgctgaagatcagttgggtgcacgagtgggttacatcgaactggatctcaacagcggtaagatccttgagagttttcgccccgaagaacgttttccaatgatgagcacttttaaagttctgctatgtggcgcggtattatcccgtattgacgccgggcaagagcaactcggtcgccgcatacactattctcagaatgacttggttgagtactcaccagtcacagaaaagcatcttacggatggcatgacagtaagagaattatgcagtgctgccataaccatgagtgataacactgcggccaacttacttctgacaacgatcggaggaccgaaggagctaaccgcttttttgcacaacatgggggatcatgtaactcgccttgatcgttgggaaccggagctgaatgaagccataccaaacgacgagcgtgacaccacgatgcctgtagcaatggcaacaacgttgcgcaaactattaactggcgaactacttactctagcttcccggcaacaattaatagactggatggaggcggataaagttgcaggaccacttctgcgctcggcccttccggctggctggtttattgctgataaatctggagccggtgagcgtggaagccgcggtatcattgcagcactggggccagatggtaagccctcccgtatcgtagttatctacacgacggggagtcaggcaactatggatgaacgaaatagacagatcgctgagataggtgcctcactgattaagcattggtaactgtcagaccaagtttactcatatatactttagattgatttaaaacttcatttttaatttaaaaggatctaggtgaagatcctttttgataatctcatgaccaaaatcccttaacgtgagttttcgttccactgagcgtcagaccccgtagaaaagatcaaaggatcttcttgagatcctttttttctgcgcgtaatctgctgcttgcaaacaaaaaaaccaccgctaccagcggtggtttgtttgccggatcaagagctaccaactctttttccgaaggtaactggcttcagcagagcgcagataccaaatactgtccttctagtgtagccgtagttaggccaccacttcaagaactctgtagcaccgcctacatacctcgctctgctaatcctgttaccagtggctgctgccagtggcgataagtcgtgtcttaccgggttggactcaagacgatagttaccggataaggcgcagcggtcgggctgaacggggggttcgtgcacacagcccagcttggagcgaacgacctacaccgaactgagatacctacagcgtgagctatgagaaagcgccacgcttcccgaagggagaaaggcggacaggtatccggtaagcggcagggtcggaacaggagagcgcacgagggagcttccagggggaaacgcctggtatctttatagtcctgtcgggtttcgccacctctgacttgagcgtcgatttttgtgatgctcgtcaggggggcggagcctatggaaaaacgccagcaacgcggcctttttacggttcctggccttttgctggccttttgctcacatgt

SEQ ID NO: 200 - DNA, 11194 bp, Artificial Sequence
  Synthetic Polynucleotide
gcacttttcggggaaatgtgcgcggaacccctatttgtttatttttctaaatacattcaaatatgtatccgctcatgagacaataaccctgataaatgcttcaataatattgaaaaaggaagagtatgagtattcaacatttccgtgtcgcccttattcccttttttgcggcattttgccttcctgtttttgctcacccagaaacgctggtgaaagtaaaagatgctgaagatcagttgggtgcacgagtgggttacatcgaactggatctcaacagcggtaagatccttgagagttttcgccccgaagaacgttttccaatgatgagcacttttaaagttctgctatgtggcgcggtattatcccgtattgacgccgggcaagagcaactcggtcgccgcatacactattctcagaatgacttggttgagtactcaccagtcacagaaaagcatcttacggatggcatgacagtaagagaattatgcagtgctgccataaccatgagtgataacactgcggccaacttacttctgacaacgatcggaggaccgaaggagctaaccgcttttttgcacaacatgggggatcatgtaactcgccttgatcgttgggaaccggagctgaatgaagccataccaaacgacgagcgtgacaccacgatgcctgtagcaatggcaacaacgttgcgcaaactattaactggcgaactacttactctagcttcccggcaacaattaatagactggatggaggcggataaagttgcaggaccacttctgcgctcggcccttccggctggctggtttattgctgataaatctggagccggtgagcgtgggtctcgcggtatcattgcagcactggggccagatggtaagccctcccgtatcgtagttatctacacgacggggagtcaggcaactatggatgaacgaaatagacagatcgctgagataggtgcctcactgattaagcattggtaactgtcagaccaagtttactcatatatactttagattgatttaaaacttcatttttaatttaaaaggatctaggtgaagatcctttttgataatctcatgaccaaaatcccttaacgtgagttttcgttccactgagcgtcagaccccgtagaaaagatcaaaggatcttcttgagatcctttttttctgcgcgtaatctgctgcttgcaaacaaaaaaaccaccgctaccagcggtggtttgtttgccggatcaagagctaccaactctttttccgaaggtaactggcttcagcagagcgcagataccaaatactgtccttctagtgtagccgtagttaggccaccacttcaagaactctgtagcaccgcctacatacctcgctctgctaatcctgttaccagtggctgctgccagtggcgataagtcgtgtcttaccgggttggactcaagacgatagttaccggataaggcgcagcggtcgggctgaacggggggttcgtgcacacagcccagcttggagcgaacgacctacaccgaactgagatacctacagcgtgagctatgagaaagcgccacgcttcccgaagggagaaaggcggacaggtatccggtaagcggcagggtcggaacaggagagcgcacgagggagcttccagggggaaacgcctggtatctttatagtcctgtcgggtttcgccacctctgacttgagcgtcgatttttgtgatgctcgtcaggggggcggagcctatggaaaaacgccagcaacgcggcctttttacggttcctggccttttgctggccttttgctcacatgttctttcctgcgttatcccctgattctgtggataaccgtattaccgcctttgagtgagctgataccgctcgccgcagccgaacgaccgagcgcagcgagtcagtgagcgaggaagcggaagagcgcccaatacgcaaaccgcctctccccgcgcgttggccgattcattaatgcagctggcacgacaggtttcccgactggaaagcgggcagtgagcgcaacgcaattaatgtgagttagctcactcattaggcaccccaggctttacactttatgcttccggctcgtatgttgtgtggaattgtgagcggataacaatttcacacaggaaacagctatgaccatgattacgccaagctcgaaattaaccctcactaaagggaacaaaagctgtgctttctctgaccagcattctctcccctgggcctgtgccgctttctgtctgcagcttgtggcctgggtcacctctacggctggcccagatccttccctgccgcctccttcaggttccgtcttcctccactccctcttccccttgctctctgctgtgttgctgcccaaggatgctctttccggagcacttccttctcggcgctgcaccacgtgatgtcctctgagcggatcctccccgtgtctgggtcctctccgggcatctctcctccctcacccaaccccatgccgtcttcactcgctgggttcccttttccttctccttctggggcctgtgccatctctcgtttcttaggatggccttctccgacggatgtctcccttgcgtcccgcctccccttcttgtaggcctgcatcatcaccgtttttctggacaaccccaaagtaccccgtctccctggctttagccacctctccatcctcttgctttctttgcctggacaccccgttctcctgtggattcgggtcacctctcactcctttcatttgggcagctcccctaccccccttacctctctagtctgtgctagctcttccagccccctgtcatggcatcttccaggggtccgagagctcagctagtcttcttcctccaacccgggcccctatgtccacttcaggacagcatgtttgctgcctccagggatcctgtgtccccgagctgggaccaccttatattcccagggccggttaatgtggctctggttctgggtacttttatctgtcccctccaccccacagtggggcaagcttctgacctcttctcttcctcccacagggcctcgagagatctggcagcggagagggcagaggaagtcttctaacatgcggtgacgtggaggagaatcccggccctaggctcgagggtaccatgattgaacaagatggattgcacgcaggttctccggccgcttgggtggagaggctattcggctatgactgggcacaacagacaatcggctgctctgatgccgccgtgttccggctgtcagcgcaggggcgcccggttctttttgtcaagaccgacctgtccggtgccctgaatgaactgcaggacgaggcagcgcggctatcgtggctggccacgacgggcgttccttgcgcagctgtgctcgacgttgtcactgaagcgggaagggactggctgctattgggcgaagtgccggggcaggatctcctgtcatctcaccttgctcctgccgagaaagtatccatcatggctgatgcaatgcggcggctgcatacgcttgatccggctacctgcccattcgaccaccaagcgaaacatcgcatcgagcgagcacgtactcggatggaagccggtcttgtcgatcaggatgatctggacgaagagcatcaggggctcgcgccagccgaactgttcgccaggctcaaggcgcgcatgcccgacggcgaggatctcgtcgtgacccatggcgatgcctgcttgccgaatatcatggtggaaaatggccgcttttctggattcatcgactgtggccggctgggtgtggcggaccgctatcaggacatagcgttggctacccgtgatattgctgaagagcttggcggcgaatgggctgaccgcttcctcgtgctttacggtatcgccgctcccgattcgcagcgcatcgccttctatcgccttcttgacgagttcttctgagtttaaacccgctgatcagcctcgactgtgccttctagttgccagccatctgttgtttgcccctcccccgtgccttccttgaccctggaaggtgccactcccactgtcctttcctaataaaatgaggaaattgcatcgcattgtctgagtaggtgtcattctattctggggggtggggtggggcaggacagcaagggggaggattgggaagacaatagcaggcatgctggggatgcggtgggctctatgggctagcggtggcggcctcgacattgattattgactagtagatctggcgcgccgcctttttacggttcctggccttttgctggccttttgctcacatgtcacgtgaggccttaacgtctcgccctttggtctccccctcttaagtaccacatttgtagaggttttacttgctttaaaaaacctcccacacctccccctgaacctgaaacataaaatgaatgcaattgttgttgttaacttgtttattgcagcttataatggttacaaataaagcaatagcatcacaaatttcacaaataaagcatttttttcactgcattctagttgtggtttgtccaaactcatcggctagcttacccggggagcatgtcaaggtcaaaatcgtcaagagcgtcagcaggcagcatatcaaggtcaaagtcgtcaagggcatcggctgggagcatgtctaagtcaaaatcgtcaagggcgtcggtcggcccgccgctttcgcactttagctgtttctccaggccacatatgattagttccaggccgaaaaggaaggcaggttcggctccctgccggtcgaacagctcaattgcttgtctcagaagtgggggcatagaatcggtggtaggtgtctctctttcctcttttgctacttgatgctcctgttcctccaatacgcagcccagtgtaaagtggcccacggcggacagagcgtacagtgcgttctccagggagaagccttgctgacacaggaacgcgagctgattttccagggtttcgtactgtttctctgttgggcgggtgccgagatgcactttagccccgtcgcgatgtgagaggagagcacagcggtatgacttggcgttgttccgcagaaagtcttgccatgactcgccttccagggggcagaagtgggtatgatgcctgtccagcatctcgattggcagggcatcgagcagggcccgcttgttcttcacgtgccagtacagggtaggctgctcaactcccagcttttgagcgagtttccttgtcgtcaggccttcgataccgacaccattgagtaattccagagctccgtttatgactttgctcttgtccagtctagacattggaccagggttttcttcaacatcaccacaagtgaggagagaacctctaccttcggcaccgggttcctttgccctcggacgagtgctggggcgtcggtttccactatcggcgagtacttctacacagccatcggtccagacggccgcgcttctgcgggcgatttgtgtacgcccgacagtcccggctccggatcggacgattgcgtcgcatcgaccctgcgcccaagctgcatcatcgaaattgccgtcaaccaagctctgatagagttggtcaagaccaatgcggagcatatacgcccggagccgcggcgatcctgcaagctccggatgcctccgctcgaagtagcgcgtctgctgctccatacaagccaaccacggcctccagaagaagatgttggcgacctcgtattgggaatccccgaacatcgcctcgctccagtcaatgaccgctgttatgcggccattgtccgtcaggacattgttggagccgaaatccgcgtgcacgaggtgccggacttcggggcagtcctcggcccaaagcatcagctcatcgagagcctgcgcgacggacgcactgacggtgtcgtccatcacagtttgccagtgatacacatggggatcagcaatcgcgcatatgaaatcacgccatgtagtgtattgaccgattccttgcggtccgaatgggccgaacccgctcgtctggctaagatcggccgcagcgatcgcatccatggcctccgcgaccggctgcagaacagcgggcagttcggtttcaggcaggtcttgcaacgtgacaccctgtgcacggcgggagatgcaataggtcaggctctcgctaaattccccaatgtcaagcacttccggaatcgggagcgcggccgatgcaaagtgccgataaacataacgatctttgtagaaaccatcggcgcagctatttacccgcaggacatatccacgccctcctacatcgaagctgaaagcacgagattcttcgccctccgagagctgcatcaggtcggagacgctgtcgaacttttcgatcagaaacttctcgacagacgtcgcggtgagttcaggctttttcatggtggcggcactagtaagggcgaattcggagcctgcttttttgtacaaacttgttgatatctgcagaattccaccacactggactagtggatccgagctcggtaccaagcttcttcacgacacctgaaatggaagaaaaaaactttgaaccactgtctgaggcttgagaatgaaccaagatccaaactcaaaaagggcaaattccaaggagaattacatcaagtgccaagctggcctaacttcagtctccacccactcagtgtggggaaactccatcgcataaaacccctccccccaacctaaagacgacgtactccaaaagctcgagaactaatcgaggtgcctggacggcgcccggtactccgtggagtcacatgaagcgacggctgaggacggaaaggcccttttcctttgtgtgggtgactcacccgcccgctctcccgagcgccgcgtcctccattttgagctccctgcagcagggccgggaagcggccatctttccgctcacgcaactggtgccgaccgggccagccttgccgcccagggcggggcgatacacggcggcgcgaggccaggcaccagagcaggccggccagcttgagactacccccgtccgattctcggtggccgcgctcgcaggccccgcctcgccgaacatgtgcgctgggacgcacgggccccgtcgccgcccgcggccccaaaaaccgaaataccagtgtgcagatcttggcccgcatttacaagactatcttgccagaaaaaaagcgtcgcagcaggtcatcaaaaattttaaatggctagagacttatcgaaagcagcgagacaggcgcgaaggtgccaccagattcgcacgcggcggccccagcgcccaggccaggcctcaactcaagcacgaggcgaaggggctccttaagcgcaaggcctcgaactctcccacccacttccaacccgaagctcgggatcaagaatcacgtactgcagccaggtggaagtaattcaaggcacgcaagggccataacccgtaaagaggccaggcccgcgggaaccacacacggcacttacctgtgttctggcggcaaacccgttgcgaaaaagaacgttcacggcgactactgcacttatatacggttctcccccaccctcgggaaaaaggcggagccagtacacgacatcactttcccagtttaccccgcgccaccttctctaggcaccggttcaattgccgacccctccccccaacttctcggggactgtgggcgatgtgcgctctgcccactgacgggcaccggagcctcacgatcgatatgtcgagtttactccctatcagtgatagagaacgtatgtcgagtttactccctatcagtgatagagaacgatgtcgagtttactccctatcagtgatagagaacgtatgtcgagtttactccctatcagtgatagagaacgtatgtcgagtttactccctatcagtgatagagaacgtatgtcgagtttatccctatcagtgatagagaacgtatgtcgagtttactccctatcagtgatagagaacgtatgtcgaggtaggcgtgtacggtgggaggcctatataagcagagctcgtttagtgaaccgtcagatcgcctggagaattggctaggcaccggtgacaagtttgtacaaaaaagcaggctccgaattcgcccttactagtgccgccaccatgaaaacatttaacatttctcaacaggatctagaattagtagaagtagcgacagagaagattacaatgctttatgaggataataaacatcatgtgggagcggcaattcgtacgaaaacaggagaaatcatttcggcagtacatattgaagcgtatataggacgagtaactgtttgtgcagaagccattgcgattggtagtgcagtttcgaatggacaaaaggattttgacacgattgtagctgttagacacccttattctgacgaagtagatagaagtattcgagtggtaagtccttgtggtatgtgtagggagttgatttcagactatgcaccagattgttttgtgttaatagaaatgaatggcaagttagtcaaaactacgattgaagaactcattccactcaaatatacccgaaatactagtggcagcggcgccacaaacttctctctgctaaagcaagcaggtgatgttgaagaaaaccccgggcctggcgcgccaatggtgagcaagggcgaggagctgttcaccggggtggtgcccatcctggtcgagctggacggcgacgtaaacggccacaagttcagcgtgtccggcgagggcgagggcgatgccacctacggcaagctgaccctgaagttcatctgcaccaccggcaagctgcccgtgccctggcccaccctcgtgaccaccctgacctacggcgtgcagtgcttcagccgctaccccgaccacatgaagcagcacgacttcttcaagtccgccatgcccgaaggctacgtccaggagcgcaccatcttcttcaaggacgacggcaactacaagacccgcgccgaggtgaagttcgagggcgacaccctggtgaaccgcatcgagctgaagggcatcgacttcaaggaggacggcaacatcctggggcacaagctggagtacaactacaacagccacaacgtctatatcatggccgacaagcagaagaacggcatcaaggtgaacttcaagatccgccacaacatcgaggacggcagcgtgcagctcgccgaccactaccagcagaacacccccatcggcgacggccccgtgctgctgcccgacaaccactacctgagcacccagtccgccctgagcaaagaccccaacgagaagcgcgatcacatggtcctgctggagttcgtgaccgccgccgggatcactctcggcatggacgagctgtacaagtaattaattaagagggcgaattcgacccagctttcttgtacaaagtggttgatatccagcacagtggcggccgctcgagtctagagggcccgcggttcgaaggtaagcctatccctaaccctctcctcggtctcgattctacgcgtaccggttaggggcccgtttaaacccgctgatcagcctcgactgtgccttctagttgccagccatctgttgtttgcccctcccccgtgccttccttgaccctggaaggtgccactcccactgtcctttcctaataaaatgaggaaattgcatcgcattgtctgagtaggtgtcattctattctggggggtggggtggggcaggacagcaagggggaggattgggaagacaatagcaggcatgctggggatgcggtgggctctatggctctagaagtcgacagtactaagctttgacagaaaagccccatccttaggcctcctccttcctagtctcctgatattgggtctaacccccacctcctgttaggcagattccttatctggtgacacacccccatttcctggagccatctctctccttgccagaacctctaaggtttgcttacgatggagccagagaggatcctgggagggagagcttggcagggggtgggagggaagggggggatgcgtgacctgcccggttctcagtggccaccctgcgctaccctctcccagaacctgagctgctctgacgcggctgtctggtgcgtttcactgatcctggtgctgcagcttccttacacttcccaagaggagaagcagtttggaaaaacaaaatcagaataagttggtcctgagttctaactttggctcttcacctttctagtccccaatttatattgttcctccgtgcgtcagttttacctgtgagataaggccagtagccagccccgtcctggcagggctgtggtgaggaggggggtgtccgtgtggaaaactccctttgtgagaatggtgcgtcctaggtgttcaccaggtcgtggccgcctctactccctttctctttctccatccttctttccttaaagagtccccagtgctatctgggacatattcctccgcccagagcagggtcccgcttccctaaggccctgctctgggcttctgggtttgagtccttggcaagcccaggagaggcgctcaggcttccctgtcccccttcctcgtccaccatctcatgcccctggctctcctgccccttccctacaggggttcctggctctgctctagcgatcgccaattcgccctatagtgagtcgtattacaattcactggccgtcgttttacaacgtcgtgactgggaaaaccctggcgttacccaacttaatcgccttgcagcacatccccctttcgccagctggcgtaatagcgaagaggcccgcaccgatcgcccttcccaacagttgcgcagcctgaatggcgaatgggacgcgccctgtagcggcgcattaagcgcggcgggtgtggtggttacgcgcagcgtgaccgctacacttgccagcgccctagcgcccgctcctttcgctttcttcccttcctttctcgccacgttcgccggctttccccgtcaagctctaaatcgggggctccctttagggttccgatttagtgctttacggcacctcgaccccaaaaaacttgattagggtgatggttcacgtagtgggccatcgccctgatagacggtttttcgccctttgacgttggagtccacgttctttaatagtggactcttgttccaaactggaacaacactcaaccctatctcggtctattcttttgatttataagggattttgccgatttcggcctattggttaaaaaatgagctgatttaacaaaaatttaacgcgaattttaacaaaatattaacgcttacaatttaggtg

SEQ ID NO: 201 - DNA, 11173 bp, Artificial Sequence
  Synthetic Polynucleotide
gcacttttcggggaaatgtgcgcggaacccctatttgtttatttttctaaatacattcaaatatgtatccgctcatgagacaataaccctgataaatgcttcaataatattgaaaaaggaagagtatgagtattcaacatttccgtgtcgcccttattcccttttttgcggcattttgccttcctgtttttgctcacccagaaacgctggtgaaagtaaaagatgctgaagatcagttgggtgcacgagtgggttacatcgaactggatctcaacagcggtaagatccttgagagttttcgccccgaagaacgttttccaatgatgagcacttttaaagttctgctatgtggcgcggtattatcccgtattgacgccgggcaagagcaactcggtcgccgcatacactattctcagaatgacttggttgagtactcaccagtcacagaaaagcatcttacggatggcatgacagtaagagaattatgcagtgctgccataaccatgagtgataacactgcggccaacttacttctgacaacgatcggaggaccgaaggagctaaccgcttttttgcacaacatgggggatcatgtaactcgccttgatcgttgggaaccggagctgaatgaagccataccaaacgacgagcgtgacaccacgatgcctgtagcaatggcaacaacgttgcgcaaactattaactggcgaactacttactctagcttcccggcaacaattaatagactggatggaggcggataaagttgcaggaccacttctgcgctcggcccttccggctggctggtttattgctgataaatctggagccggtgagcgtgggtctcgcggtatcattgcagcactggggccagatggtaagccctcccgtatcgtagttatctacacgacggggagtcaggcaactatggatgaacgaaatagacagatcgctgagataggtgcctcactgattaagcattggtaactgtcagaccaagtttactcatatatactttagattgatttaaaacttcatttttaatttaaaaggatctaggtgaagatcctttttgataatctcatgaccaaaatcccttaacgtgagttttcgttccactgagcgtcagaccccgtagaaaagatcaaaggatcttcttgagatcctttttttctgcgcgtaatctgctgcttgcaaacaaaaaaaccaccgctaccagcggtggtttgtttgccggatcaagagctaccaactctttttccgaaggtaactggcttcagcagagcgcagataccaaatactgtccttctagtgtagccgtagttaggccaccacttcaagaactctgtagcaccgcctacatacctcgctctgctaatcctgttaccagtggctgctgccagtggcgataagtcgtgtcttaccgggttggactcaagacgatagttaccggataaggcgcagcggtcgggctgaacggggggttcgtgcacacagcccagcttggagcgaacgacctacaccgaactgagatacctacagcgtgagctatgagaaagcgccacgcttcccgaagggagaaaggcggacaggtatccggtaagcggcagggtcggaacaggagagcgcacgagggagcttccagggggaaacgcctggtatctttatagtcctgtcgggtttcgccacctctgacttgagcgtcgatttttgtgatgctcgtcaggggggcggagcctatggaaaaacgccagcaacgcggcctttttacggttcctggccttttgctggccttttgctcacatgttctttcctgcgttatcccctgattctgtggataaccgtattaccgcctttgagtgagctgataccgctcgccgcagccgaacgaccgagcgcagcgagtcagtgagcgaggaagcggaagagcgcccaatacgcaaaccgcctctccccgcgcgttggccgattcattaatgcagctggcacgacaggtttcccgactggaaagcgggcagtgagcgcaacgcaattaatgtgagttagctcactcattaggcaccccaggctttacactttatgcttccggctcgtatgttgtgtggaattgtgagcggataacaatttcacacaggaaacagctatgaccatgattacgccaagctcgaaattaaccctcactaaagggaacaaaagctgtgctttctctgaccagcattctctcccctgggcctgtgccgctttctgtctgcagcttgtggcctgggtcacctctacggctggcccagatccttccctgccgcctccttcaggttccgtcttcctccactccctcttccccttgctctctgctgtgttgctgcccaaggatgctctttccggagcacttccttctcggcgctgcaccacgtgatgtcctctgagcggatcctccccgtgtctgggtcctctccgggcatctctcctccctcacccaaccccatgccgtcttcactcgctgggttcccttttccttctccttctggggcctgtgccatctctcgtttcttaggatggccttctccgacggatgtctcccttgcgtcccgcctccccttcttgtaggcctgcatcatcaccgtttttctggacaaccccaaagtaccccgtctccctggctttagccacctctccatcctcttgctttctttgcctggacaccccgttctcctgtggattcgggtcacctctcactcctttcatttgggcagctcccctaccccccttacctctctagtctgtgctagctcttccagccccctgtcatggcatcttccaggggtccgagagctcagctagtcttcttcctccaacccgggcccctatgtccacttcaggacagcatgtttgctgcctccagggatcctgtgtccccgagctgggaccaccttatattcccagggccggttaatgtggctctggttctgggtacttttatctgtcccctccaccccacagtggggcaagcttctgacctcttctcttcctcccacagggcctcgagagatctggcagcggagagggcagaggaagtcttctaacatgcggtgacgtggaggagaatcccggccctaggctcgagggtaccatgattgaacaagatggattgcacgcaggttctccggccgcttgggtggagaggctattcggctatgactgggcacaacagacaatcggctgctctgatgccgccgtgttccggctgtcagcgcaggggcgcccggttctttttgtcaagaccgacctgtccggtgccctgaatgaactgcaggacgaggcagcgcggctatcgtggctggccacgacgggcgttccttgcgcagctgtgctcgacgttgtcactgaagcgggaagggactggctgctattgggcgaagtgccggggcaggatctcctgtcatctcaccttgctcctgccgagaaagtatccatcatggctgatgcaatgcggcggctgcatacgcttgatccggctacctgcccattcgaccaccaagcgaaacatcgcatcgagcgagcacgtactcggatggaagccggtcttgtcgatcaggatgatctggacgaagagcatcaggggctcgcgccagccgaactgttcgccaggctcaaggcgcgcatgcccgacggcgaggatctcgtcgtgacccatggcgatgcctgcttgccgaatatcatggtggaaaatggccgcttttctggattcatcgactgtggccggctgggtgtggcggaccgctatcaggacatagcgttggctacccgtgatattgctgaagagcttggcggcgaatgggctgaccgcttcctcgtgctttacggtatcgccgctcccgattcgcagcgcatcgccttctatcgccttcttgacgagttcttctgagtttaaacccgctgatcagcctcgactgtgccttctagttgccagccatctgttgtttgcccctcccccgtgccttccttgaccctggaaggtgccactcccactgtcctttcctaataaaatgaggaaattgcatcgcattgtctgagtaggtgtcattctattctggggggtggggtggggcaggacagcaagggggaggattgggaagacaatagcaggcatgctggggatgcggtgggctctatgggctagcggtggcggcctcgacattgattattgactagtagatctggcgcgccgcctttttacggttcctggccttttgctggccttttgctcacatgtcacgtgaggccttaacgtctcgccctttggtctccccctcttaagtaccacatttgtagaggttttacttgctttaaaaaacctcccacacctccccctgaacctgaaacataaaatgaatgcaattgttgttgttaacttgtttattgcagcttataatggttacaaataaagcaatagcatcacaaatttcacaaataaagcatttttttcactgcattctagttgtggtttgtccaaactcatcggctagcttacccggggagcatgtcaaggtcaaaatcgtcaagagcgtcagcaggcagcatatcaaggtcaaagtcgtcaagggcatcggctgggagcatgtctaagtcaaaatcgtcaagggcgtcggtcggcccgccgctttcgcactttagctgtttctccaggccacatatgattagttccaggccgaaaaggaaggcaggttcggctccctgccggtcgaacagctcaattgcttgtctcagaagtgggggcatagaatcggtggtaggtgtctctctttcctcttttgctacttgatgctcctgttcctccaatacgcagcccagtgtaaagtggcccacggcggacagagcgtacagtgcgttctccagggagaagccttgctgacacaggaacgcgagctgattttccagggtttcgtactgtttctctgttgggcgggtgccgagatgcactttagccccgtcgcgatgtgagaggagagcacagcggtatgacttggcgttgttccgcagaaagtcttgccatgactcgccttccagggggcagaagtgggtatgatgcctgtccagcatctcgattggcagggcatcgagcagggcccgcttgttcttcacgtgccagtacagggtaggctgctcaactcccagcttttgagcgagtttccttgtcgtcaggccttcgataccgacaccattgagtaattccagagctccgtttatgactttgctcttgtccagtctagacattggaccagggttttcttcaacatcaccacaagtgaggagagaacctctaccttcggcaccgggttcctttgccctcggacgagtgctggggcgtcggtttccactatcggcgagtacttctacacagccatcggtccagacggccgcgcttctgcgggcgatttgtgtacgcccgacagtcccggctccggatcggacgattgcgtcgcatcgaccctgcgcccaagctgcatcatcgaaattgccgtcaaccaagctctgatagagttggtcaagaccaatgcggagcatatacgcccggagccgcggcgatcctgcaagctccggatgcctccgctcgaagtagcgcgtctgctgctccatacaagccaaccacggcctccagaagaagatgttggcgacctcgtattgggaatccccgaacatcgcctcgctccagtcaatgaccgctgttatgcggccattgtccgtcaggacattgttggagccgaaatccgcgtgcacgaggtgccggacttcggggcagtcctcggcccaaagcatcagctcatcgagagcctgcgcgacggacgcactgacggtgtcgtccatcacagtttgccagtgatacacatggggatcagcaatcgcgcatatgaaatcacgccatgtagtgtattgaccgattccttgcggtccgaatgggccgaacccgctcgtctggctaagatcggccgcagcgatcgcatccatggcctccgcgaccggctgcagaacagcgggcagttcggtttcaggcaggtcttgcaacgtgacaccctgtgcacggcgggagatgcaataggtcaggctctcgctaaattccccaatgtcaagcacttccggaatcgggagcgcggccgatgcaaagtgccgataaacataacgatctttgtagaaaccatcggcgcagctatttacccgcaggacatatccacgccctcctacatcgaagctgaaagcacgagattcttcgccctccgagagctgcatcaggtcggagacgctgtcgaacttttcgatcagaaacttctcgacagacgtcgcggtgagttcaggctttttcatggtggcggcactagtaagggcgaattcggagcctgcttttttgtacaaacttgttgatatctgcagaattccaccacactggactagtggatccgagctcggtaccaagcttcttcacgacacctgaaatggaagaaaaaaactttgaaccactgtctgaggcttgagaatgaaccaagatccaaactcaaaaagggcaaattccaaggagaattacatcaagtgccaagctggcctaacttcagtctccacccactcagtgtggggaaactccatcgcataaaacccctccccccaacctaaagacgacgtactccaaaagctcgagaactaatcgaggtgcctggacggcgcccggtactccgtggagtcacatgaagcgacggctgaggacggaaaggcccttttcctttgtgtgggtgactcacccgcccgctctcccgagcgccgcgtcctccattttgagctccctgcagcagggccgggaagcggccatctttccgctcacgcaactggtgccgaccgggccagccttgccgcccagggcggggcgatacacggcggcgcgaggccaggcaccagagcaggccggccagcttgagactacccccgtccgattctcggtggccgcgctcgcaggccccgcctcgccgaacatgtgcgctgggacgcacgggccccgtcgccgcccgcggccccaaaaaccgaaataccagtgtgcagatcttggcccgcatttacaagactatcttgccagaaaaaaagcgtcgcagcaggtcatcaaaaattttaaatggctagagacttatcgaaagcagcgagacaggcgcgaaggtgccaccagattcgcacgcggcggccccagcgcccaggccaggcctcaactcaagcacgaggcgaaggggctccttaagcgcaaggcctcgaactctcccacccacttccaacccgaagctcgggatcaagaatcacgtactgcagccaggtggaagtaattcaaggcacgcaagggccataacccgtaaagaggccaggcccgcgggaaccacacacggcacttacctgtgttctggcggcaaacccgttgcgaaaaagaacgttcacggcgactactgcacttatatacggttctcccccaccctcgggaaaaaggcggagccagtacacgacatcactttcccagtttaccccgcgccaccttctctaggcaccggttcaattgccgacccctccccccaacttctcggggactgtgggcgatgtgcgctctgcccactgacgggcaccggagcctcacgatcgatatgtcgagtttactccctatcagtgatagagaacgtatgtcgagtttactccctatcagtgatagagaacgatgtcgagtttactccctatcagtgatagagaacgtatgtcgagtttactccctatcagtgatagagaacgtatgtcgagtttactccctatcagtgatagagaacgtatgtcgagtttatccctatcagtgatagagaacgtatgtcgagtttactccctatcagtgatagagaacgtatgtcgaggtaggcgtgtacggtgggaggcctatataagcagagctcgtttagtgaaccgtcagatcgcctggagaattggctaggcaccggtgacaagtttgtacaaaaaagcaggctccgaattcgcccttactagtgccgccaccatgaaaacatttaacatttctcaacaggatctagaattagtagaagtagcgacagagaagattacaatgctttatgaggataataaacatcatgtgggagcggcaattcgtacgaaaacaggagaaatcatttcggcagtacatattgaagcgtatataggacgagtaactgtttgtgcagaagccattgcgattggtagtgcagtttcgaatggacaaaaggattttgacacgattgtagctgttagacacccttattctgacgaagtagatagaagtattcgagtggtaagtccttgtggtatgtgtagggagttgatttcagactatgcaccagattgttttgtgttaatagaaatgaatggcaagttagtcaaaactacgattgaagaactcattccactcaaatatacccgaaatactagtggcagcggcgccacaaacttctctctgctaaagcaagcaggtgatgttgaagaaaaccccgggcctggcgcgccaatggtgagcaagggcgaggcagtgatcaaggagttcatgcggttcaaggtgcacatggagggctccatgaacggccacgagttcgagatcgagggcgagggcgagggccgcccctacgagggcacccagaccgccaagctgaaggtgaccaagggtggccccctgcccttctcctgggacatcctgtcccctcagttcatgtacggctccagggccttcaccaagcaccccgccgacatccccgactactataagcagtccttccccgagggcttcaagtgggagcgcgtgatgaacttcgaggacggcggcgccgtgaccgtgacccaggacacctccctggaggacggcaccctgatctacaaggtgaagctccgtggcaccaacttccctcctgacggccccgtaatgcagaagaagacaatgggctgggaagcgtccaccgagcggttgtaccccgaggacggcgtgctgaagggcgacattaagatggccctgcgcctgaaggacggcggccgctacctggcggacttcaagaccacctacaaggccaagaagcccgtgcagatgcccggcgcctacaacgtcgaccgcaagttggacatcacctcccacaacgaggactacaccgtggtggaacagtacgaacgctccgagggccgccactccaccggcggcatggacgagctgtacaagtgattaattaaaagggcgaattcgacccagctttcttgtacaaagtggttgatatccagcacagtggcggccgctcgagtctagagggcccgcggttcgaaggtaagcctatccctaaccctctcctcggtctcgattctacgcgtaccggttaggggcccgtttaaacccgctgatcagcctcgactgtgccttctagttgccagccatctgttgtttgcccctcccccgtgccttccttgaccctggaaggtgccactcccactgtcctttcctaataaaatgaggaaattgcatcgcattgtctgagtaggtgtcattctattctggggggtggggtggggcaggacagcaagggggaggattgggaagacaatagcaggcatgctggggatgcggtgggctctatggctctagaagtcgacagtactaagctttgacagaaaagccccatccttaggcctcctccttcctagtctcctgatattgggtctaacccccacctcctgttaggcagattccttatctggtgacacacccccatttcctggagccatctctctccttgccagaacctctaaggtttgcttacgatggagccagagaggatcctgggagggagagcttggcagggggtgggagggaagggggggatgcgtgacctgcccggttctcagtggccaccctgcgctaccctctcccagaacctgagctgctctgacgcggctgtctggtgcgtttcactgatcctggtgctgcagcttccttacacttcccaagaggagaagcagtttggaaaaacaaaatcagaataagttggtcctgagttctaactttggctcttcacctttctagtccccaatttatattgttcctccgtgcgtcagttttacctgtgagataaggccagtagccagccccgtcctggcagggctgtggtgaggaggggggtgtccgtgtggaaaactccctttgtgagaatggtgcgtcctaggtgttcaccaggtcgtggccgcctctactccctttctctttctccatccttctttccttaaagagtccccagtgctatctgggacatattcctccgcccagagcagggtcccgcttccctaaggccctgctctgggcttctgggtttgagtccttggcaagcccaggagaggcgctcaggcttccctgtcccccttcctcgtccaccatctcatgcccctggctctcctgccccttccctacaggggttcctggctctgctctagcgatcgccaattcgccctatagtgagtcgtattacaattcactggccgtcgttttacaacgtcgtgactgggaaaaccctggcgttacccaacttaatcgccttgcagcacatccccctttcgccagctggcgtaatagcgaagaggcccgcaccgatcgcccttcccaacagttgcgcagcctgaatggcgaatgggacgcgccctgtagcggcgcattaagcgcggcgggtgtggtggttacgcgcagcgtgaccgctacacttgccagcgccctagcgcccgctcctttcgctttcttcccttcctttctcgccacgttcgccggctttccccgtcaagctctaaatcgggggctccctttagggttccgatttagtgctttacggcacctcgaccccaaaaaacttgattagggtgatggttcacgtagtgggccatcgccctgatagacggtttttcgccctttgacgttggagtccacgttctttaatagtggactcttgttccaaactggaacaacactcaaccctatctcggtctattcttttgatttataagggattttgccgatttcggcctattggttaaaaaatgagctgatttaacaaaaatttaacgcgaattttaacaaaatattaacgcttacaatttaggtg

SEQ ID NO: 202 - DNA, 11386 bp, Artificial Sequence
  Synthetic Polynucleotide
gcacttttcggggaaatgtgcgcggaacccctatttgtttatttttctaaatacattcaaatatgtatccgctcatgagacaataaccctgataaatgcttcaataatattgaaaaaggaagagtatgagtattcaacatttccgtgtcgcccttattcccttttttgcggcattttgccttcctgtttttgctcacccagaaacgctggtgaaagtaaaagatgctgaagatcagttgggtgcacgagtgggttacatcgaactggatctcaacagcggtaagatccttgagagttttcgccccgaagaacgttttccaatgatgagcacttttaaagttctgctatgtggcgcggtattatcccgtattgacgccgggcaagagcaactcggtcgccgcatacactattctcagaatgacttggttgagtactcaccagtcacagaaaagcatcttacggatggcatgacagtaagagaattatgcagtgctgccataaccatgagtgataacactgcggccaacttacttctgacaacgatcggaggaccgaaggagctaaccgcttttttgcacaacatgggggatcatgtaactcgccttgatcgttgggaaccggagctgaatgaagccataccaaacgacgagcgtgacaccacgatgcctgtagcaatggcaacaacgttgcgcaaactattaactggcgaactacttactctagcttcccggcaacaattaatagactggatggaggcggataaagttgcaggaccacttctgcgctcggcccttccggctggctggtttattgctgataaatctggagccggtgagcgtgggtctcgcggtatcattgcagcactggggccagatggtaagccctcccgtatcgtagttatctacacgacggggagtcaggcaactatggatgaacgaaatagacagatcgctgagataggtgcctcactgattaagcattggtaactgtcagaccaagtttactcatatatactttagattgatttaaaacttcatttttaatttaaaaggatctaggtgaagatcctttttgataatctcatgaccaaaatcccttaacgtgagttttcgttccactgagcgtcagaccccgtagaaaagatcaaaggatcttcttgagatcctttttttctgcgcgtaatctgctgcttgcaaacaaaaaaaccaccgctaccagcggtggtttgtttgccggatcaagagctaccaactctttttccgaaggtaactggcttcagcagagcgcagataccaaatactgtccttctagtgtagccgtagttaggccaccacttcaagaactctgtagcaccgcctacatacctcgctctgctaatcctgttaccagtggctgctgccagtggcgataagtcgtgtcttaccgggttggactcaagacgatagttaccggataaggcgcagcggtcgggctgaacggggggttcgtgcacacagcccagcttggagcgaacgacctacaccgaactgagatacctacagcgtgagctatgagaaagcgccacgcttcccgaagggagaaaggcggacaggtatccggtaagcggcagggtcggaacaggagagcgcacgagggagcttccagggggaaacgcctggtatctttatagtcctgtcgggtttcgccacctctgacttgagcgtcgatttttgtgatgctcgtcaggggggcggagcctatggaaaaacgccagcaacgcggcctttttacggttcctggccttttgctggccttttgctcacatgttctttcctgcgttatcccctgattctgtggataaccgtattaccgcctttgagtgagctgataccgctcgccgcagccgaacgaccgagcgcagcgagtcagtgagcgaggaagcggaagagcgcccaatacgcaaaccgcctctccccgcgcgttggccgattcattaatgcagctggcacgacaggtttcccgactggaaagcgggcagtgagcgcaacgcaattaatgtgagttagctcactcattaggcaccccaggctttacactttatgcttccggctcgtatgttgtgtggaattgtgagcggataacaatttcacacaggaaacagctatgaccatgattacgccaagctcgaaattaaccctcactaaagggaacaaaagctgtgctttctctgaccagcattctctcccctgggcctgtgccgctttctgtctgcagcttgtggcctgggtcacctctacggctggcccagatccttccctgccgcctccttcaggttccgtcttcctccactccctcttccccttgctctctgctgtgttgctgcccaaggatgctctttccggagcacttccttctcggcgctgcaccacgtgatgtcctctgagcggatcctccccgtgtctgggtcctctccgggcatctctcctccctcacccaaccccatgccgtcttcactcgctgggttcccttttccttctccttctggggcctgtgccatctctcgtttcttaggatggccttctccgacggatgtctcccttgcgtcccgcctccccttcttgtaggcctgcatcatcaccgtttttctggacaaccccaaagtaccccgtctccctggctttagccacctctccatcctcttgctttctttgcctggacaccccgttctcctgtggattcgggtcacctctcactcctttcatttgggcagctcccctaccccccttacctctctagtctgtgctagctcttccagccccctgtcatggcatcttccaggggtccgagagctcagctagtcttcttcctccaacccgggcccctatgtccacttcaggacagcatgtttgctgcctccagggatcctgtgtccccgagctgggaccaccttatattcccagggccggttaatgtggctctggttctgggtacttttatctgtcccctccaccccacagtggggcaagcttctgacctcttctcttcctcccacagggcctcgagagatctggcagcggagagggcagaggaagtcttctaacatgcggtgacgtggaggagaatcccggccctaggctcgagggtaccatgattgaacaagatggattgcacgcaggttctccggccgcttgggtggagaggctattcggctatgactgggcacaacagacaatcggctgctctgatgccgccgtgttccggctgtcagcgcaggggcgcccggttctttttgtcaagaccgacctgtccggtgccctgaatgaactgcaggacgaggcagcgcggctatcgtggctggccacgacgggcgttccttgcgcagctgtgctcgacgttgtcactgaagcgggaagggactggctgctattgggcgaagtgccggggcaggatctcctgtcatctcaccttgctcctgccgagaaagtatccatcatggctgatgcaatgcggcggctgcatacgcttgatccggctacctgcccattcgaccaccaagcgaaacatcgcatcgagcgagcacgtactcggatggaagccggtcttgtcgatcaggatgatctggacgaagagcatcaggggctcgcgccagccgaactgttcgccaggctcaaggcgcgcatgcccgacggcgaggatctcgtcgtgacccatggcgatgcctgcttgccgaatatcatggtggaaaatggccgcttttctggattcatcgactgtggccggctgggtgtggcggaccgctatcaggacatagcgttggctacccgtgatattgctgaagagcttggcggcgaatgggctgaccgcttcctcgtgctttacggtatcgccgctcccgattcgcagcgcatcgccttctatcgccttcttgacgagttcttctgagtttaaacccgctgatcagcctcgactgtgccttctagttgccagccatctgttgtttgcccctcccccgtgccttccttgaccctggaaggtgccactcccactgtcctttcctaataaaatgaggaaattgcatcgcattgtctgagtaggtgtcattctattctggggggtggggtggggcaggacagcaagggggaggattgggaagacaatagcaggcatgctggggatgcggtgggctctatgggctagcggtggcggcctcgacattgattattgactagtagatctggcgcgccgcctttttacggttcctggccttttgctggccttttgctcacatgtcacgtgaggccttaacgtctcgccctttggtctccccctcttaagtaccacatttgtagaggttttacttgctttaaaaaacctcccacacctccccctgaacctgaaacataaaatgaatgcaattgttgttgttaacttgtttattgcagcttataatggttacaaataaagcaatagcatcacaaatttcacaaataaagcatttttttcactgcattctagttgtggtttgtccaaactcatcggctagcttacccggggagcatgtcaaggtcaaaatcgtcaagagcgtcagcaggcagcatatcaaggtcaaagtcgtcaagggcatcggctgggagcatgtctaagtcaaaatcgtcaagggcgtcggtcggcccgccgctttcgcactttagctgtttctccaggccacatatgattagttccaggccgaaaaggaaggcaggttcggctccctgccggtcgaacagctcaattgcttgtctcagaagtgggggcatagaatcggtggtaggtgtctctctttcctcttttgctacttgatgctcctgttcctccaatacgcagcccagtgtaaagtggcccacggcggacagagcgtacagtgcgttctccagggagaagccttgctgacacaggaacgcgagctgattttccagggtttcgtactgtttctctgttgggcgggtgccgagatgcactttagccccgtcgcgatgtgagaggagagcacagcggtatgacttggcgttgttccgcagaaagtcttgccatgactcgccttccagggggcagaagtgggtatgatgcctgtccagcatctcgattggcagggcatcgagcagggcccgcttgttcttcacgtgccagtacagggtaggctgctcaactcccagcttttgagcgagtttccttgtcgtcaggccttcgataccgacaccattgagtaattccagagctccgtttatgactttgctcttgtccagtctagacattggaccagggttttcttcaacatcaccacaagtgaggagagaacctctaccttcggcaccgggttcctttgccctcggacgagtgctggggcgtcggtttccactatcggcgagtacttctacacagccatcggtccagacggccgcgcttctgcgggcgatttgtgtacgcccgacagtcccggctccggatcggacgattgcgtcgcatcgaccctgcgcccaagctgcatcatcgaaattgccgtcaaccaagctctgatagagttggtcaagaccaatgcggagcatatacgcccggagccgcggcgatcctgcaagctccggatgcctccgctcgaagtagcgcgtctgctgctccatacaagccaaccacggcctccagaagaagatgttggcgacctcgtattgggaatccccgaacatcgcctcgctccagtcaatgaccgctgttatgcggccattgtccgtcaggacattgttggagccgaaatccgcgtgcacgaggtgccggacttcggggcagtcctcggcccaaagcatcagctcatcgagagcctgcgcgacggacgcactgacggtgtcgtccatcacagtttgccagtgatacacatggggatcagcaatcgcgcatatgaaatcacgccatgtagtgtattgaccgattccttgcggtccgaatgggccgaacccgctcgtctggctaagatcggccgcagcgatcgcatccatggcctccgcgaccggctgcagaacagcgggcagttcggtttcaggcaggtcttgcaacgtgacaccctgtgcacggcgggagatgcaataggtcaggctctcgctaaattccccaatgtcaagcacttccggaatcgggagcgcggccgatgcaaagtgccgataaacataacgatctttgtagaaaccatcggcgcagctatttacccgcaggacatatccacgccctcctacatcgaagctgaaagcacgagattcttcgccctccgagagctgcatcaggtcggagacgctgtcgaacttttcgatcagaaacttctcgacagacgtcgcggtgagttcaggctttttcatggtggcggcactagtaagggcgaattcggagcctgcttttttgtacaaacttgttgatatctgcagaattccaccacactggactagtggatccgagctcggtaccaagcttcttcacgacacctgaaatggaagaaaaaaactttgaaccactgtctgaggcttgagaatgaaccaagatccaaactcaaaaagggcaaattccaaggagaattacatcaagtgccaagctggcctaacttcagtctccacccactcagtgtggggaaactccatcgcataaaacccctccccccaacctaaagacgacgtactccaaaagctcgagaactaatcgaggtgcctggacggcgcccggtactccgtggagtcacatgaagcgacggctgaggacggaaaggcccttttcctttgtgtgggtgactcacccgcccgctctcccgagcgccgcgtcctccattttgagctccctgcagcagggccgggaagcggccatctttccgctcacgcaactggtgccgaccgggccagccttgccgcccagggcggggcgatacacggcggcgcgaggccaggcaccagagcaggccggccagcttgagactacccccgtccgattctcggtggccgcgctcgcaggccccgcctcgccgaacatgtgcgctgggacgcacgggccccgtcgccgcccgcggccccaaaaaccgaaataccagtgtgcagatcttggcccgcatttacaagactatcttgccagaaaaaaagcgtcgcagcaggtcatcaaaaattttaaatggctagagacttatcgaaagcagcgagacaggcgcgaaggtgccaccagattcgcacgcggcggccccagcgcccaggccaggcctcaactcaagcacgaggcgaaggggctccttaagcgcaaggcctcgaactctcccacccacttccaacccgaagctcgggatcaagaatcacgtactgcagccaggtggaagtaattcaaggcacgcaagggccataacccgtaaagaggccaggcccgcgggaaccacacacggcacttacctgtgttctggcggcaaacccgttgcgaaaaagaacgttcacggcgactactgcacttatatacggttctcccccaccctcgggaaaaaggcggagccagtacacgacatcactttcccagtttaccccgcgccaccttctctaggcaccggttcaattgccgacccctccccccaacttctcggggactgtgggcgatgtgcgctctgcccactgacgggcaccggagcctcacgatcgatatgtcgagtttactccctatcagtgatagagaacgtatgtcgagtttactccctatcagtgatagagaacgatgtcgagtttactccctatcagtgatagagaacgtatgtcgagtttactccctatcagtgatagagaacgtatgtcgagtttactccctatcagtgatagagaacgtatgtcgagtttatccctatcagtgatagagaacgtatgtcgagtttactccctatcagtgatagagaacgtatgtcgaggtaggcgtgtacggtgggaggcctatataagcagagctcgtttagtgaaccgtcagatcgcctggagaattggctaggcaccggtgacaagtttgtacaaaaaagcaggctccgaattcgcccttactagtgccgccaccatgaaaacatttaacatttctcaacaggatctagaattagtagaagtagcgacagagaagattacaatgctttatgaggataataaacatcatgtgggagcggcaattcgtacgaaaacaggagaaatcatttcggcagtacatattgaagcgtatataggacgagtaactgtttgtgcagaagccattgcgattggtagtgcagtttcgaatggacaaaaggattttgacacgattgtagctgttagacacccttattctgacgaagtagatagaagtattcgagtggtaagtccttgtggtatgtgcctttcatacgagaccgagatcctgactgtcgagtacggattgcttcctatcggcaaaatcgtggagaagaggattgaatgtaccgtctattcagtcgataataatgggaacatctacacacagcccgtggctcaatggcacgacagaggagagcaggaagtttttgaatactgtctcgaggacggatccctcatccgcgctactaaagatcataagtttatgaccgtggacggccagatgctgccaattgacgaaatttttgaacgagagctggatctgatgagagtcgacaaccttccaaacactagtggcagcggcgccacaaacttctctctgctaaagcaagcaggtgatgttgaagaaaaccccgggcctggcgcgccaatggtgagcaagggcgaggagctgttcaccggggtggtgcccatcctggtcgagctggacggcgacgtaaacggccacaagttcagcgtgtccggcgagggcgagggcgatgccacctacggcaagctgaccctgaagttcatctgcaccaccggcaagctgcccgtgccctggcccaccctcgtgaccaccctgacctacggcgtgcagtgcttcagccgctaccccgaccacatgaagcagcacgacttcttcaagtccgccatgcccgaaggctacgtccaggagcgcaccatcttcttcaaggacgacggcaactacaagacccgcgccgaggtgaagttcgagggcgacaccctggtgaaccgcatcgagctgaagggcatcgacttcaaggaggacggcaacatcctggggcacaagctggagtacaactacaacagccacaacgtctatatcatggccgacaagcagaagaacggcatcaaggtgaacttcaagatccgccacaacatcgaggacggcagcgtgcagctcgccgaccactaccagcagaacacccccatcggcgacggccccgtgctgctgcccgacaaccactacctgagcacccagtccgccctgagcaaagaccccaacgagaagcgcgatcacatggtcctgctggagttcgtgaccgccgccgggatcactctcggcatggacgagctgtacaagtaattaattaagagggcgaattcgacccagctttcttgtacaaagtggttgatatccagcacagtggcggccgctcgagtctagagggcccgcggttcgaaggtaagcctatccctaaccctctcctcggtctcgattctacgcgtaccggttaggggcccgtttaaacccgctgatcagcctcgactgtgccttctagttgccagccatctgttgtttgcccctcccccgtgccttccttgaccctggaaggtgccactcccactgtcctttcctaataaaatgaggaaattgcatcgcattgtctgagtaggtgtcattctattctggggggtggggtggggcaggacagcaagggggaggattgggaagacaatagcaggcatgctggggatgcggtgggctctatggctctagaagtcgacagtactaagctttgacagaaaagccccatccttaggcctcctccttcctagtctcctgatattgggtctaacccccacctcctgttaggcagattccttatctggtgacacacccccatttcctggagccatctctctccttgccagaacctctaaggtttgcttacgatggagccagagaggatcctgggagggagagcttggcagggggtgggagggaagggggggatgcgtgacctgcccggttctcagtggccaccctgcgctaccctctcccagaacctgagctgctctgacgcggctgtctggtgcgtttcactgatcctggtgctgcagcttccttacacttcccaagaggagaagcagtttggaaaaacaaaatcagaataagttggtcctgagttctaactttggctcttcacctttctagtccccaatttatattgttcctccgtgcgtcagttttacctgtgagataaggccagtagccagccccgtcctggcagggctgtggtgaggaggggggtgtccgtgtggaaaactccctttgtgagaatggtgcgtcctaggtgttcaccaggtcgtggccgcctctactccctttctctttctccatccttctttccttaaagagtccccagtgctatctgggacatattcctccgcccagagcagggtcccgcttccctaaggccctgctctgggcttctgggtttgagtccttggcaagcccaggagaggcgctcaggcttccctgtcccccttcctcgtccaccatctcatgcccctggctctcctgccccttccctacaggggttcctggctctgctctagcgatcgccaattcgccctatagtgagtcgtattacaattcactggccgtcgttttacaacgtcgtgactgggaaaaccctggcgttacccaacttaatcgccttgcagcacatccccctttcgccagctggcgtaatagcgaagaggcccgcaccgatcgcccttcccaacagttgcgcagcctgaatggcgaatgggacgcgccctgtagcggcgcattaagcgcggcgggtgtggtggttacgcgcagcgtgaccgctacacttgccagcgccctagcgcccgctcctttcgctttcttcccttcctttctcgccacgttcgccggctttccccgtcaagctctaaatcgggggctccctttagggttccgatttagtgctttacggcacctcgaccccaaaaaacttgattagggtgatggttcacgtagtgggccatcgccctgatagacggtttttcgccctttgacgttggagtccacgttctttaatagtggactcttgttccaaactggaacaacactcaaccctatctcggtctattcttttgatttataagggattttgccgatttcggcctattggttaaaaaatgagctgatttaacaaaaatttaacgcgaattttaacaaaatattaacgcttacaatttaggtg

SEQ ID NO: 203 - DNA, 10975 bp, Artificial Sequence
  Synthetic Polynucleotide
gcacttttcggggaaatgtgcgcggaacccctatttgtttatttttctaaatacattcaaatatgtatccgctcatgagacaataaccctgataaatgcttcaataatattgaaaaaggaagagtatgagtattcaacatttccgtgtcgcccttattcccttttttgcggcattttgccttcctgtttttgctcacccagaaacgctggtgaaagtaaaagatgctgaagatcagttgggtgcacgagtgggttacatcgaactggatctcaacagcggtaagatccttgagagttttcgccccgaagaacgttttccaatgatgagcacttttaaagttctgctatgtggcgcggtattatcccgtattgacgccgggcaagagcaactcggtcgccgcatacactattctcagaatgacttggttgagtactcaccagtcacagaaaagcatcttacggatggcatgacagtaagagaattatgcagtgctgccataaccatgagtgataacactgcggccaacttacttctgacaacgatcggaggaccgaaggagctaaccgcttttttgcacaacatgggggatcatgtaactcgccttgatcgttgggaaccggagctgaatgaagccataccaaacgacgagcgtgacaccacgatgcctgtagcaatggcaacaacgttgcgcaaactattaactggcgaactacttactctagcttcccggcaacaattaatagactggatggaggcggataaagttgcaggaccacttctgcgctcggcccttccggctggctggtttattgctgataaatctggagccggtgagcgtgggtctcgcggtatcattgcagcactggggccagatggtaagccctcccgtatcgtagttatctacacgacggggagtcaggcaactatggatgaacgaaatagacagatcgctgagataggtgcctcactgattaagcattggtaactgtcagaccaagtttactcatatatactttagattgatttaaaacttcatttttaatttaaaaggatctaggtgaagatcctttttgataatctcatgaccaaaatcccttaacgtgagttttcgttccactgagcgtcagaccccgtagaaaagatcaaaggatcttcttgagatcctttttttctgcgcgtaatctgctgcttgcaaacaaaaaaaccaccgctaccagcggtggtttgtttgccggatcaagagctaccaactctttttccgaaggtaactggcttcagcagagcgcagataccaaatactgtccttctagtgtagccgtagttaggccaccacttcaagaactctgtagcaccgcctacatacctcgctctgctaatcctgttaccagtggctgctgccagtggcgataagtcgtgtcttaccgggttggactcaagacgatagttaccggataaggcgcagcggtcgggctgaacggggggttcgtgcacacagcccagcttggagcgaacgacctacaccgaactgagatacctacagcgtgagctatgagaaagcgccacgcttcccgaagggagaaaggcggacaggtatccggtaagcggcagggtcggaacaggagagcgcacgagggagcttccagggggaaacgcctggtatctttatagtcctgtcgggtttcgccacctctgacttgagcgtcgatttttgtgatgctcgtcaggggggcggagcctatggaaaaacgccagcaacgcggcctttttacggttcctggccttttgctggccttttgctcacatgttctttcctgcgttatcccctgattctgtggataaccgtattaccgcctttgagtgagctgataccgctcgccgcagccgaacgaccgagcgcagcgagtcagtgagcgaggaagcggaagagcgcccaatacgcaaaccgcctctccccgcgcgttggccgattcattaatgcagctggcacgacaggtttcccgactggaaagcgggcagtgagcgcaacgcaattaatgtgagttagctcactcattaggcaccccaggctttacactttatgcttccggctcgtatgttgtgtggaattgtgagcggataacaatttcacacaggaaacagctatgaccatgattacgccaagctcgaaattaaccctcactaaagggaacaaaagctgtgctttctctgaccagcattctctcccctgggcctgtgccgctttctgtctgcagcttgtggcctgggtcacctctacggctggcccagatccttccctgccgcctccttcaggttccgtcttcctccactccctcttccccttgctctctgctgtgttgctgcccaaggatgctctttccggagcacttccttctcggcgctgcaccacgtgatgtcctctgagcggatcctccccgtgtctgggtcctctccgggcatctctcctccctcacccaaccccatgccgtcttcactcgctgggttcccttttccttctccttctggggcctgtgccatctctcgtttcttaggatggccttctccgacggatgtctcccttgcgtcccgcctccccttcttgtaggcctgcatcatcaccgtttttctggacaaccccaaagtaccccgtctccctggctttagccacctctccatcctcttgctttctttgcctggacaccccgttctcctgtggattcgggtcacctctcactcctttcatttgggcagctcccctaccccccttacctctctagtctgtgctagctcttccagccccctgtcatggcatcttccaggggtccgagagctcagctagtcttcttcctccaacccgggcccctatgtccacttcaggacagcatgtttgctgcctccagggatcctgtgtccccgagctgggaccaccttatattcccagggccggttaatgtggctctggttctgggtacttttatctgtcccctccaccccacagtggggcaagcttctgacctcttctcttcctcccacagggcctcgagagatctggcagcggagagggcagaggaagtcttctaacatgcggtgacgtggaggagaatcccggccctaggctcgagggtaccatgattgaacaagatggattgcacgcaggttctccggccgcttgggtggagaggctattcggctatgactgggcacaacagacaatcggctgctctgatgccgccgtgttccggctgtcagcgcaggggcgcccggttctttttgtcaagaccgacctgtccggtgccctgaatgaactgcaggacgaggcagcgcggctatcgtggctggccacgacgggcgttccttgcgcagctgtgctcgacgttgtcactgaagcgggaagggactggctgctattgggcgaagtgccggggcaggatctcctgtcatctcaccttgctcctgccgagaaagtatccatcatggctgatgcaatgcggcggctgcatacgcttgatccggctacctgcccattcgaccaccaagcgaaacatcgcatcgagcgagcacgtactcggatggaagccggtcttgtcgatcaggatgatctggacgaagagcatcaggggctcgcgccagccgaactgttcgccaggctcaaggcgcgcatgcccgacggcgaggatctcgtcgtgacccatggcgatgcctgcttgccgaatatcatggtggaaaatggccgcttttctggattcatcgactgtggccggctgggtgtggcggaccgctatcaggacatagcgttggctacccgtgatattgctgaagagcttggcggcgaatgggctgaccgcttcctcgtgctttacggtatcgccgctcccgattcgcagcgcatcgccttctatcgccttcttgacgagttcttctgagtttaaacccgctgatcagcctcgactgtgccttctagttgccagccatctgttgtttgcccctcccccgtgccttccttgaccctggaaggtgccactcccactgtcctttcctaataaaatgaggaaattgcatcgcattgtctgagtaggtgtcattctattctggggggtggggtggggcaggacagcaagggggaggattgggaagacaatagcaggcatgctggggatgcggtgggctctatgggctagcggtggcggcctcgacattgattattgactagtagatctggcgcgccgcctttttacggttcctggccttttgctggccttttgctcacatgtcacgtgaggccttaacgtctcgccctttggtctccccctcttaagtaccacatttgtagaggttttacttgctttaaaaaacctcccacacctccccctgaacctgaaacataaaatgaatgcaattgttgttgttaacttgtttattgcagcttataatggttacaaataaagcaatagcatcacaaatttcacaaataaagcatttttttcactgcattctagttgtggtttgtccaaactcatcggctagcttacccggggagcatgtcaaggtcaaaatcgtcaagagcgtcagcaggcagcatatcaaggtcaaagtcgtcaagggcatcggctgggagcatgtctaagtcaaaatcgtcaagggcgtcggtcggcccgccgctttcgcactttagctgtttctccaggccacatatgattagttccaggccgaaaaggaaggcaggttcggctccctgccggtcgaacagctcaattgcttgtctcagaagtgggggcatagaatcggtggtaggtgtctctctttcctcttttgctacttgatgctcctgttcctccaatacgcagcccagtgtaaagtggcccacggcggacagagcgtacagtgcgttctccagggagaagccttgctgacacaggaacgcgagctgattttccagggtttcgtactgtttctctgttgggcgggtgccgagatgcactttagccccgtcgcgatgtgagaggagagcacagcggtatgacttggcgttgttccgcagaaagtcttgccatgactcgccttccagggggcagaagtgggtatgatgcctgtccagcatctcgattggcagggcatcgagcagggcccgcttgttcttcacgtgccagtacagggtaggctgctcaactcccagcttttgagcgagtttccttgtcgtcaggccttcgataccgacaccattgagtaattccagagctccgtttatgactttgctcttgtccagtctagacattggaccagggttttcttcaacatcaccacaagtgaggagagaacctctaccttcggcaccgggttcctttgccctcggacgagtgctggggcgtcggtttccactatcggcgagtacttctacacagccatcggtccagacggccgcgcttctgcgggcgatttgtgtacgcccgacagtcccggctccggatcggacgattgcgtcgcatcgaccctgcgcccaagctgcatcatcgaaattgccgtcaaccaagctctgatagagttggtcaagaccaatgcggagcatatacgcccggagccgcggcgatcctgcaagctccggatgcctccgctcgaagtagcgcgtctgctgctccatacaagccaaccacggcctccagaagaagatgttggcgacctcgtattgggaatccccgaacatcgcctcgctccagtcaatgaccgctgttatgcggccattgtccgtcaggacattgttggagccgaaatccgcgtgcacgaggtgccggacttcggggcagtcctcggcccaaagcatcagctcatcgagagcctgcgcgacggacgcactgacggtgtcgtccatcacagtttgccagtgatacacatggggatcagcaatcgcgcatatgaaatcacgccatgtagtgtattgaccgattccttgcggtccgaatgggccgaacccgctcgtctggctaagatcggccgcagcgatcgcatccatggcctccgcgaccggctgcagaacagcgggcagttcggtttcaggcaggtcttgcaacgtgacaccctgtgcacggcgggagatgcaataggtcaggctctcgctaaattccccaatgtcaagcacttccggaatcgggagcgcggccgatgcaaagtgccgataaacataacgatctttgtagaaaccatcggcgcagctatttacccgcaggacatatccacgccctcctacatcgaagctgaaagcacgagattcttcgccctccgagagctgcatcaggtcggagacgctgtcgaacttttcgatcagaaacttctcgacagacgtcgcggtgagttcaggctttttcatggtggcggcactagtaagggcgaattcggagcctgcttttttgtacaaacttgttgatatctgcagaattccaccacactggactagtggatccgagctcggtaccaagcttcttcacgacacctgaaatggaagaaaaaaactttgaaccactgtctgaggcttgagaatgaaccaagatccaaactcaaaaagggcaaattccaaggagaattacatcaagtgccaagctggcctaacttcagtctccacccactcagtgtggggaaactccatcgcataaaacccctccccccaacctaaagacgacgtactccaaaagctcgagaactaatcgaggtgcctggacggcgcccggtactccgtggagtcacatgaagcgacggctgaggacggaaaggcccttttcctttgtgtgggtgactcacccgcccgctctcccgagcgccgcgtcctccattttgagctccctgcagcagggccgggaagcggccatctttccgctcacgcaactggtgccgaccgggccagccttgccgcccagggcggggcgatacacggcggcgcgaggccaggcaccagagcaggccggccagcttgagactacccccgtccgattctcggtggccgcgctcgcaggccccgcctcgccgaacatgtgcgctgggacgcacgggccccgtcgccgcccgcggccccaaaaaccgaaataccagtgtgcagatcttggcccgcatttacaagactatcttgccagaaaaaaagcgtcgcagcaggtcatcaaaaattttaaatggctagagacttatcgaaagcagcgagacaggcgcgaaggtgccaccagattcgcacgcggcggccccagcgcccaggccaggcctcaactcaagcacgaggcgaaggggctccttaagcgcaaggcctcgaactctcccacccacttccaacccgaagctcgggatcaagaatcacgtactgcagccaggtggaagtaattcaaggcacgcaagggccataacccgtaaagaggccaggcccgcgggaaccacacacggcacttacctgtgttctggcggcaaacccgttgcgaaaaagaacgttcacggcgactactgcacttatatacggttctcccccaccctcgggaaaaaggcggagccagtacacgacatcactttcccagtttaccccgcgccaccttctctaggcaccggttcaattgccgacccctccccccaacttctcggggactgtgggcgatgtgcgctctgcccactgacgggcaccggagcctcacgatcgatatgtcgagtttactccctatcagtgatagagaacgtatgtcgagtttactccctatcagtgatagagaacgatgtcgagtttactccctatcagtgatagagaacgtatgtcgagtttactccctatcagtgatagagaacgtatgtcgagtttactccctatcagtgatagagaacgtatgtcgagtttatccctatcagtgatagagaacgtatgtcgagtttactccctatcagtgatagagaacgtatgtcgaggtaggcgtgtacggtgggaggcctatataagcagagctcgtttagtgaaccgtcagatcgcctggagaattggctaggcaccggtgacaagtttgtacaaaaaagcaggctccgaattcgcccttactagtgccgccaccatgattaagatcgctacgcggaagtacctggggaaacagaacgtctacgacataggtgtggagcgcgatcacaactttgctctgaaaaatggatttatcgccagcaactgtagggagttgatttcagactatgcaccagattgttttgtgttaatagaaatgaatggcaagttagtcaaaactacgattgaagaactcattccactcaaatatacccgaaatactagtggcagcggcgccacaaacttctctctgctaaagcaagcaggtgatgttgaagaaaaccccgggcctggcgcgccaatggtgagcaagggcgaggcagtgatcaaggagttcatgcggttcaaggtgcacatggagggctccatgaacggccacgagttcgagatcgagggcgagggcgagggccgcccctacgagggcacccagaccgccaagctgaaggtgaccaagggtggccccctgcccttctcctgggacatcctgtcccctcagttcatgtacggctccagggccttcaccaagcaccccgccgacatccccgactactataagcagtccttccccgagggcttcaagtgggagcgcgtgatgaacttcgaggacggcggcgccgtgaccgtgacccaggacacctccctggaggacggcaccctgatctacaaggtgaagctccgtggcaccaacttccctcctgacggccccgtaatgcagaagaagacaatgggctgggaagcgtccaccgagcggttgtaccccgaggacggcgtgctgaagggcgacattaagatggccctgcgcctgaaggacggcggccgctacctggcggacttcaagaccacctacaaggccaagaagcccgtgcagatgcccggcgcctacaacgtcgaccgcaagttggacatcacctcccacaacgaggactacaccgtggtggaacagtacgaacgctccgagggccgccactccaccggcggcatggacgagctgtacaagtgattaattaaaagggcgaattcgacccagctttcttgtacaaagtggttgatatccagcacagtggcggccgctcgagtctagagggcccgcggttcgaaggtaagcctatccctaaccctctcctcggtctcgattctacgcgtaccggttaggggcccgtttaaacccgctgatcagcctcgactgtgccttctagttgccagccatctgttgtttgcccctcccccgtgccttccttgaccctggaaggtgccactcccactgtcctttcctaataaaatgaggaaattgcatcgcattgtctgagtaggtgtcattctattctggggggtggggtggggcaggacagcaagggggaggattgggaagacaatagcaggcatgctggggatgcggtgggctctatggctctagaagtcgacagtactaagctttgacagaaaagccccatccttaggcctcctccttcctagtctcctgatattgggtctaacccccacctcctgttaggcagattccttatctggtgacacacccccatttcctggagccatctctctccttgccagaacctctaaggtttgcttacgatggagccagagaggatcctgggagggagagcttggcagggggtgggagggaagggggggatgcgtgacctgcccggttctcagtggccaccctgcgctaccctctcccagaacctgagctgctctgacgcggctgtctggtgcgtttcactgatcctggtgctgcagcttccttacacttcccaagaggagaagcagtttggaaaaacaaaatcagaataagttggtcctgagttctaactttggctcttcacctttctagtccccaatttatattgttcctccgtgcgtcagttttacctgtgagataaggccagtagccagccccgtcctggcagggctgtggtgaggaggggggtgtccgtgtggaaaactccctttgtgagaatggtgcgtcctaggtgttcaccaggtcgtggccgcctctactccctttctctttctccatccttctttccttaaagagtccccagtgctatctgggacatattcctccgcccagagcagggtcccgcttccctaaggccctgctctgggcttctgggtttgagtccttggcaagcccaggagaggcgctcaggcttccctgtcccccttcctcgtccaccatctcatgcccctggctctcctgccccttccctacaggggttcctggctctgctctagcgatcgccaattcgccctatagtgagtcgtattacaattcactggccgtcgttttacaacgtcgtgactgggaaaaccctggcgttacccaacttaatcgccttgcagcacatccccctttcgccagctggcgtaatagcgaagaggcccgcaccgatcgcccttcccaacagttgcgcagcctgaatggcgaatgggacgcgccctgtagcggcgcattaagcgcggcgggtgtggtggttacgcgcagcgtgaccgctacacttgccagcgccctagcgcccgctcctttcgctttcttcccttcctttctcgccacgttcgccggctttccccgtcaagctctaaatcgggggctccctttagggttccgatttagtgctttacggcacctcgaccccaaaaaacttgattagggtgatggttcacgtagtgggccatcgccctgatagacggtttttcgccctttgacgttggagtccacgttctttaatagtggactcttgttccaaactggaacaacactcaaccctatctcggtctattcttttgatttataagggattttgccgatttcggcctattggttaaaaaatgagctgatttaacaaaaatttaacgcgaattttaacaaaatattaacgcttacaatttaggtg

SEQ ID NO: 204 - DNA, 11947 bp, Artificial Sequence
  Synthetic Polynucleotide
gcacttttcggggaaatgtgcgcggaacccctatttgtttatttttctaaatacattcaaatatgtatccgctcatgagacaataaccctgataaatgcttcaataatattgaaaaaggaagagtatgagtattcaacatttccgtgtcgcccttattcccttttttgcggcattttgccttcctgtttttgctcacccagaaacgctggtgaaagtaaaagatgctgaagatcagttgggtgcacgagtgggttacatcgaactggatctcaacagcggtaagatccttgagagttttcgccccgaagaacgttttccaatgatgagcacttttaaagttctgctatgtggcgcggtattatcccgtattgacgccgggcaagagcaactcggtcgccgcatacactattctcagaatgacttggttgagtactcaccagtcacagaaaagcatcttacggatggcatgacagtaagagaattatgcagtgctgccataaccatgagtgataacactgcggccaacttacttctgacaacgatcggaggaccgaaggagctaaccgcttttttgcacaacatgggggatcatgtaactcgccttgatcgttgggaaccggagctgaatgaagccataccaaacgacgagcgtgacaccacgatgcctgtagcaatggcaacaacgttgcgcaaactattaactggcgaactacttactctagcttcccggcaacaattaatagactggatggaggcggataaagttgcaggaccacttctgcgctcggcccttccggctggctggtttattgctgataaatctggagccggtgagcgtgggtctcgcggtatcattgcagcactggggccagatggtaagccctcccgtatcgtagttatctacacgacggggagtcaggcaactatggatgaacgaaatagacagatcgctgagataggtgcctcactgattaagcattggtaactgtcagaccaagtttactcatatatactttagattgatttaaaacttcatttttaatttaaaaggatctaggtgaagatcctttttgataatctcatgaccaaaatcccttaacgtgagttttcgttccactgagcgtcagaccccgtagaaaagatcaaaggatcttcttgagatcctttttttctgcgcgtaatctgctgcttgcaaacaaaaaaaccaccgctaccagcggtggtttgtttgccggatcaagagctaccaactctttttccgaaggtaactggcttcagcagagcgcagataccaaatactgtccttctagtgtagccgtagttaggccaccacttcaagaactctgtagcaccgcctacatacctcgctctgctaatcctgttaccagtggctgctgccagtggcgataagtcgtgtcttaccgggttggactcaagacgatagttaccggataaggcgcagcggtcgggctgaacggggggttcgtgcacacagcccagcttggagcgaacgacctacaccgaactgagatacctacagcgtgagctatgagaaagcgccacgcttcccgaagggagaaaggcggacaggtatccggtaagcggcagggtcggaacaggagagcgcacgagggagcttccagggggaaacgcctggtatctttatagtcctgtcgggtttcgccacctctgacttgagcgtcgatttttgtgatgctcgtcaggggggcggagcctatggaaaaacgccagcaacgcggcctttttacggttcctggccttttgctggccttttgctcacatgttctttcctgcgttatcccctgattctgtggataaccgtattaccgcctttgagtgagctgataccgctcgccgcagccgaacgaccgagcgcagcgagtcagtgagcgaggaagcggaagagcgcccaatacgcaaaccgcctctccccgcgcgttggccgattcattaatgcagctggcacgacaggtttcccgactggaaagcgggcagtgagcgcaacgcaattaatgtgagttagctcactcattaggcaccccaggctttacactttatgcttccggctcgtatgttgtgtggaattgtgagcggataacaatttcacacaggaaacagctatgaccatgattacgccaagctcgaaattaaccctcactaaagggaacaaaagctgtgctttctctgaccagcattctctcccctgggcctgtgccgctttctgtctgcagcttgtggcctgggtcacctctacggctggcccagatccttccctgccgcctccttcaggttccgtcttcctccactccctcttccccttgctctctgctgtgttgctgcccaaggatgctctttccggagcacttccttctcggcgctgcaccacgtgatgtcctctgagcggatcctccccgtgtctgggtcctctccgggcatctctcctccctcacccaaccccatgccgtcttcactcgctgggttcccttttccttctccttctggggcctgtgccatctctcgtttcttaggatggccttctccgacggatgtctcccttgcgtcccgcctccccttcttgtaggcctgcatcatcaccgtttttctggacaaccccaaagtaccccgtctccctggctttagccacctctccatcctcttgctttctttgcctggacaccccgttctcctgtggattcgggtcacctctcactcctttcatttgggcagctcccctaccccccttacctctctagtctgtgctagctcttccagccccctgtcatggcatcttccaggggtccgagagctcagctagtcttcttcctccaacccgggcccctatgtccacttcaggacagcatgtttgctgcctccagggatcctgtgtccccgagctgggaccaccttatattcccagggccggttaatgtggctctggttctgggtacttttatctgtcccctccaccccacagtggggcaagcttctgacctcttctcttcctcccacagggcctcgagagatctggcagcggagagggcagaggaagtcttctaacatgcggtgacgtggaggagaatcccggccctaggctcgagggtaccatgattgaacaagatggattgcacgcaggttctccggccgcttgggtggagaggctattcggctatgactgggcacaacagacaatcggctgctctgatgccgccgtgttccggctgtcagcgcaggggcgcccggttctttttgtcaagaccgacctgtccggtgccctgaatgaactgcaggacgaggcagcgcggctatcgtggctggccacgacgggcgttccttgcgcagctgtgctcgacgttgtcactgaagcgggaagggactggctgctattgggcgaagtgccggggcaggatctcctgtcatctcaccttgctcctgccgagaaagtatccatcatggctgatgcaatgcggcggctgcatacgcttgatccggctacctgcccattcgaccaccaagcgaaacatcgcatcgagcgagcacgtactcggatggaagccggtcttgtcgatcaggatgatctggacgaagagcatcaggggctcgcgccagccgaactgttcgccaggctcaaggcgcgcatgcccgacggcgaggatctcgtcgtgacccatggcgatgcctgcttgccgaatatcatggtggaaaatggccgcttttctggattcatcgactgtggccggctgggtgtggcggaccgctatcaggacatagcgttggctacccgtgatattgctgaagagcttggcggcgaatgggctgaccgcttcctcgtgctttacggtatcgccgctcccgattcgcagcgcatcgccttctatcgccttcttgacgagttcttctgagtttaaacccgctgatcagcctcgactgtgccttctagttgccagccatctgttgtttgcccctcccccgtgccttccttgaccctggaaggtgccactcccactgtcctttcctaataaaatgaggaaattgcatcgcattgtctgagtaggtgtcattctattctggggggtggggtggggcaggacagcaagggggaggattgggaagacaatagcaggcatgctggggatgcggtgggctctatgggctagcggtggcggcctcgacattgattattgactagtagatctggcgcgccgcctttttacggttcctggccttttgctggccttttgctcacatgtcacgtgaggccttaacgtctcgccctttggtctccccctcttaagtaccacatttgtagaggttttacttgctttaaaaaacctcccacacctccccctgaacctgaaacataaaatgaatgcaattgttgttgttaacttgtttattgcagcttataatggttacaaataaagcaatagcatcacaaatttcacaaataaagcatttttttcactgcattctagttgtggtttgtccaaactcatcggctagcttacccggggagcatgtcaaggtcaaaatcgtcaagagcgtcagcaggcagcatatcaaggtcaaagtcgtcaagggcatcggctgggagcatgtctaagtcaaaatcgtcaagggcgtcggtcggcccgccgctttcgcactttagctgtttctccaggccacatatgattagttccaggccgaaaaggaaggcaggttcggctccctgccggtcgaacagctcaattgcttgtctcagaagtgggggcatagaatcggtggtaggtgtctctctttcctcttttgctacttgatgctcctgttcctccaatacgcagcccagtgtaaagtggcccacggcggacagagcgtacagtgcgttctccagggagaagccttgctgacacaggaacgcgagctgattttccagggtttcgtactgtttctctgttgggcgggtgccgagatgcactttagccccgtcgcgatgtgagaggagagcacagcggtatgacttggcgttgttccgcagaaagtcttgccatgactcgccttccagggggcagaagtgggtatgatgcctgtccagcatctcgattggcagggcatcgagcagggcccgcttgttcttcacgtgccagtacagggtaggctgctcaactcccagcttttgagcgagtttccttgtcgtcaggccttcgataccgacaccattgagtaattccagagctccgtttatgactttgctcttgtccagtctagacattggaccagggttttcttcaacatcaccacaagtgaggagagaacctctaccttcggcaccgggatttcgggtatatttgagtggaatgagttcttcaatcgtagttttgactaacttgccattcatttctattaacacaaaacaatctggtgcatagtctgaaatcaactccctacacataccacaaggacttaccactcgaatacttctatctacttcgtcagaataagggtgtctaacagctacaatcgtgtcaaaatccttttgtccattcgaaactgcactaccaatcgcaatggcttctgcacaaacagttactcgtcctatatacgcttcaatatgtactgccgaaatgatttctcctgttttcgtacgaattgccgctcccacatgatgtttattatcctcataaagcattgtaatcttctctgtcgctacttctactaattctagatcctgttgagaaatgttaaatgttttcatggtggcggcactagtaagggcgaattcggagcctgcttttttgtacaaacttgttgatatctgcagaattccaccacactggactagtggatccgagctcggtaccaagcttcttcacgacacctgaaatggaagaaaaaaactttgaaccactgtctgaggcttgagaatgaaccaagatccaaactcaaaaagggcaaattccaaggagaattacatcaagtgccaagctggcctaacttcagtctccacccactcagtgtggggaaactccatcgcataaaacccctccccccaacctaaagacgacgtactccaaaagctcgagaactaatcgaggtgcctggacggcgcccggtactccgtggagtcacatgaagcgacggctgaggacggaaaggcccttttcctttgtgtgggtgactcacccgcccgctctcccgagcgccgcgtcctccattttgagctccctgcagcagggccgggaagcggccatctttccgctcacgcaactggtgccgaccgggccagccttgccgcccagggcggggcgatacacggcggcgcgaggccaggcaccagagcaggccggccagcttgagactacccccgtccgattctcggtggccgcgctcgcaggccccgcctcgccgaacatgtgcgctgggacgcacgggccccgtcgccgcccgcggccccaaaaaccgaaataccagtgtgcagatcttggcccgcatttacaagactatcttgccagaaaaaaagcgtcgcagcaggtcatcaaaaattttaaatggctagagacttatcgaaagcagcgagacaggcgcgaaggtgccaccagattcgcacgcggcggccccagcgcccaggccaggcctcaactcaagcacgaggcgaaggggctccttaagcgcaaggcctcgaactctcccacccacttccaacccgaagctcgggatcaagaatcacgtactgcagccaggtggaagtaattcaaggcacgcaagggccataacccgtaaagaggccaggcccgcgggaaccacacacggcacttacctgtgttctggcggcaaacccgttgcgaaaaagaacgttcacggcgactactgcacttatatacggttctcccccaccctcgggaaaaaggcggagccagtacacgacatcactttcccagtttaccccgcgccaccttctctaggcaccggttcaattgccgacccctccccccaacttctcggggactgtgggcgatgtgcgctctgcccactgacgggcaccggagcctcacgatcgatatgtcgagtttactccctatcagtgatagagaacgtatgtcgagtttactccctatcagtgatagagaacgatgtcgagtttactccctatcagtgatagagaacgtatgtcgagtttactccctatcagtgatagagaacgtatgtcgagtttactccctatcagtgatagagaacgtatgtcgagtttatccctatcagtgatagagaacgtatgtcgagtttactccctatcagtgatagagaacgtatgtcgaggtaggcgtgtacggtgggaggcctatataagcagagctcgtttagtgaaccgtcagatcgcctggagaattggctaggcaccggtgacaagtttgtacaaaaaagcaggctccgaattcgcccttactagtgccgccaccatgaaaaagcctgaactcaccgcgacgtctgtcgagaagtttctgatcgaaaagttcgacagcgtctccgacctgatgcagctctcggagggcgaagaatctcgtgctttcagcttcgatgtaggagggcgtggatatgtcctgcgggtaaatagctgcgccgatggtttctacaaagatcgttatgtttatcggcactttgcatcggccgcgctcccgattccggaagtgcttgacattggggaatttagcgagagcctgacctattgcatctcccgccgtgcacagggtgtcacgttgcaagacctgcctgaaaccgaactgcccgctgttctgcagccggtcgcggaggccatggatgcgatcgctgcggccgatcttagccagacgagcgggttcggcccattcggaccgcaaggaatcggtcaatacactacatggcgtgatttcatatgcgcgattgctgatccccatgtgtatcactggcaaactgtgatggacgacaccgtcagtgcgtccgtcgcgcaggctctcgatgagctgatgctttgggccgaggactgccccgaagtccggcacctcgtgcacgcggatttcggctccaacaatgtcctgacggacaatggccgcataacagcggtcattgactggagcgaggcgatgttcggggattcccaatacgaggtcgccaacatcttcttctggaggccgtggttggcttgtatggagcagcagacgcgctacttcgagcggaggcatccggagcttgcaggatcgccgcggctccgggcgtatatgctccgcattggtcttgaccaactctatcagagcttggttgacggcaatttcgatgatgcagcttgggcgcagggtcgatgcgacgcaatcgtccgatccggagccgggactgtcgggcgtacacaaatcgcccgcagaagcgcggccgtctggaccgatggctgtgtagaagtactcgccgatagtggaaaccgacgccccagcactcgtccgagggcaaaggaaactagtggcagcggcgccacaaacttctctctgctaaagcaagcaggtgatgttgaagaaaaccccgggcctggcgcgccaatgaatacactcgagatggacatcatcagcgtggctctgaagaggcactccaccaaggctttcgacgcttccaagaaactgacccctgaacaggccgagcagatcaagaccctgctccagtacagccctagctccaccaacagccagccttggcacttcatcgtggctagcaccgaggaaggcaaagctagggtggctaagagcgccgctggcaactacgtgttcaacgagaggaagatgctggatgctagccacgtggtggtgttctgcgctaagaccgccatggacgatgtgtggctgaagctggtggtggatcaggaagatgctgatggcaggttcgctacccctgaagctaaggccgctaacgacaagggcaggaagttcttcgccgacatgcacaggaaggatctgcacgatgatgctgagtggatggccaagcaggtgtacctgaacgtgggcaacttcctgctcggcgtggctgccctgggcctcgatgctgtgcccatcgaaggcttcgatgctgctatcctggatgccgagttcggcctgaaggagaaaggctacaccagcctggtggtggtgcctgtgggccaccacagcgtggaggacttcaacgctaccctgcctaagagcaggctgccccagaacatcaccctgaccgaggtgggccggccaggctcgggccagtgtactaattatgctctcttgaaattggctggagatgttgagagcaacccaggtcccttaattaagatggtgagcaagggcgaggagctgttcaccggggtggtgcccatcctggtcgagctggacggcgacgtaaacggccacaagttcagcgtgtccggcgagggcgagggcgatgccacctacggcaagctgaccctgaagttcatctgcaccaccggcaagctgcccgtgccctggcccaccctcgtgaccaccctgacctacggcgtgcagtgcttcagccgctaccccgaccacatgaagcagcacgacttcttcaagtccgccatgcccgaaggctacgtccaggagcgcaccatcttcttcaaggacgacggcaactacaagacccgcgccgaggtgaagttcgagggcgacaccctggtgaaccgcatcgagctgaagggcatcgacttcaaggaggacggcaacatcctggggcacaagctggagtacaactacaacagccacaacgtctatatcatggccgacaagcagaagaacggcatcaaggtgaacttcaagatccgccacaacatcgaggacggcagcgtgcagctcgccgaccactaccagcagaacacccccatcggcgacggccccgtgctgctgcccgacaaccactacctgagcacccagtccgccctgagcaaagaccccaacgagaagcgcgatcacatggtcctgctggagttcgtgaccgccgccgggatcactctcggcatggacgagctgtacaagtaattaattaagagggcgaattcgacccagctttcttgtacaaagtggttgatatccagcacagtggcggccgctcgagtctagagggcccgcggttcgaaggtaagcctatccctaaccctctcctcggtctcgattctacgcgtaccggttaggggcccgtttaaacccgctgatcagcctcgactgtgccttctagttgccagccatctgttgtttgcccctcccccgtgccttccttgaccctggaaggtgccactcccactgtcctttcctaataaaatgaggaaattgcatcgcattgtctgagtaggtgtcattctattctggggggtggggtggggcaggacagcaagggggaggattgggaagacaatagcaggcatgctggggatgcggtgggctctatggctctagaagtcgacagtactaagctttgacagaaaagccccatccttaggcctcctccttcctagtctcctgatattgggtctaacccccacctcctgttaggcagattccttatctggtgacacacccccatttcctggagccatctctctccttgccagaacctctaaggtttgcttacgatggagccagagaggatcctgggagggagagcttggcagggggtgggagggaagggggggatgcgtgacctgcccggttctcagtggccaccctgcgctaccctctcccagaacctgagctgctctgacgcggctgtctggtgcgtttcactgatcctggtgctgcagcttccttacacttcccaagaggagaagcagtttggaaaaacaaaatcagaataagttggtcctgagttctaactttggctcttcacctttctagtccccaatttatattgttcctccgtgcgtcagttttacctgtgagataaggccagtagccagccccgtcctggcagggctgtggtgaggaggggggtgtccgtgtggaaaactccctttgtgagaatggtgcgtcctaggtgttcaccaggtcgtggccgcctctactccctttctctttctccatccttctttccttaaagagtccccagtgctatctgggacatattcctccgcccagagcagggtcccgcttccctaaggccctgctctgggcttctgggtttgagtccttggcaagcccaggagaggcgctcaggcttccctgtcccccttcctcgtccaccatctcatgcccctggctctcctgccccttccctacaggggttcctggctctgctctagcgatcgccaattcgccctatagtgagtcgtattacaattcactggccgtcgttttacaacgtcgtgactgggaaaaccctggcgttacccaacttaatcgccttgcagcacatccccctttcgccagctggcgtaatagcgaagaggcccgcaccgatcgcccttcccaacagttgcgcagcctgaatggcgaatgggacgcgccctgtagcggcgcattaagcgcggcgggtgtggtggttacgcgcagcgtgaccgctacacttgccagcgccctagcgcccgctcctttcgctttcttcccttcctttctcgccacgttcgccggctttccccgtcaagctctaaatcgggggctccctttagggttccgatttagtgctttacggcacctcgaccccaaaaaacttgattagggtgatggttcacgtagtgggccatcgccctgatagacggtttttcgccctttgacgttggagtccacgttctttaatagtggactcttgttccaaactggaacaacactcaaccctatctcggtctattcttttgatttataagggattttgccgatttcggcctattggttaaaaaatgagctgatttaacaaaaatttaacgcgaattttaacaaaatattaacgcttacaatttaggtg

SEQ ID NO: 205 - DNA, 11938 bp, Artificial Sequence
  Synthetic Polynucleotide
gcacttttcggggaaatgtgcgcggaacccctatttgtttatttttctaaatacattcaaatatgtatccgctcatgagacaataaccctgataaatgcttcaataatattgaaaaaggaagagtatgagtattcaacatttccgtgtcgcccttattcccttttttgcggcattttgccttcctgtttttgctcacccagaaacgctggtgaaagtaaaagatgctgaagatcagttgggtgcacgagtgggttacatcgaactggatctcaacagcggtaagatccttgagagttttcgccccgaagaacgttttccaatgatgagcacttttaaagttctgctatgtggcgcggtattatcccgtattgacgccgggcaagagcaactcggtcgccgcatacactattctcagaatgacttggttgagtactcaccagtcacagaaaagcatcttacggatggcatgacagtaagagaattatgcagtgctgccataaccatgagtgataacactgcggccaacttacttctgacaacgatcggaggaccgaaggagctaaccgcttttttgcacaacatgggggatcatgtaactcgccttgatcgttgggaaccggagctgaatgaagccataccaaacgacgagcgtgacaccacgatgcctgtagcaatggcaacaacgttgcgcaaactattaactggcgaactacttactctagcttcccggcaacaattaatagactggatggaggcggataaagttgcaggaccacttctgcgctcggcccttccggctggctggtttattgctgataaatctggagccggtgagcgtgggtctcgcggtatcattgcagcactggggccagatggtaagccctcccgtatcgtagttatctacacgacggggagtcaggcaactatggatgaacgaaatagacagatcgctgagataggtgcctcactgattaagcattggtaactgtcagaccaagtttactcatatatactttagattgatttaaaacttcatttttaatttaaaaggatctaggtgaagatcctttttgataatctcatgaccaaaatcccttaacgtgagttttcgttccactgagcgtcagaccccgtagaaaagatcaaaggatcttcttgagatcctttttttctgcgcgtaatctgctgcttgcaaacaaaaaaaccaccgctaccagcggtggtttgtttgccggatcaagagctaccaactctttttccgaaggtaactggcttcagcagagcgcagataccaaatactgtccttctagtgtagccgtagttaggccaccacttcaagaactctgtagcaccgcctacatacctcgctctgctaatcctgttaccagtggctgctgccagtggcgataagtcgtgtcttaccgggttggactcaagacgatagttaccggataaggcgcagcggtcgggctgaacggggggttcgtgcacacagcccagcttggagcgaacgacctacaccgaactgagatacctacagcgtgagctatgagaaagcgccacgcttcccgaagggagaaaggcggacaggtatccggtaagcggcagggtcggaacaggagagcgcacgagggagcttccagggggaaacgcctggtatctttatagtcctgtcgggtttcgccacctctgacttgagcgtcgatttttgtgatgctcgtcaggggggcggagcctatggaaaaacgccagcaacgcggcctttttacggttcctggccttttgctggccttttgctcacatgttctttcctgcgttatcccctgattctgtggataaccgtattaccgcctttgagtgagctgataccgctcgccgcagccgaacgaccgagcgcagcgagtcagtgagcgaggaagcggaagagcgcccaatacgcaaaccgcctctccccgcgcgttggccgattcattaatgcagctggcacgacaggtttcccgactggaaagcgggcagtgagcgcaacgcaattaatgtgagttagctcactcattaggcaccccaggctttacactttatgcttccggctcgtatgttgtgtggaattgtgagcggataacaatttcacacaggaaacagctatgaccatgattacgccaagctcgaaattaaccctcactaaagggaacaaaagctgtgctttctctgaccagcattctctcccctgggcctgtgccgctttctgtctgcagcttgtggcctgggtcacctctacggctggcccagatccttccctgccgcctccttcaggttccgtcttcctccactccctcttccccttgctctctgctgtgttgctgcccaaggatgctctttccggagcacttccttctcggcgctgcaccacgtgatgtcctctgagcggatcctccccgtgtctgggtcctctccgggcatctctcctccctcacccaaccccatgccgtcttcactcgctgggttcccttttccttctccttctggggcctgtgccatctctcgtttcttaggatggccttctccgacggatgtctcccttgcgtcccgcctccccttcttgtaggcctgcatcatcaccgtttttctggacaaccccaaagtaccccgtctccctggctttagccacctctccatcctcttgctttctttgcctggacaccccgttctcctgtggattcgggtcacctctcactcctttcatttgggcagctcccctaccccccttacctctctagtctgtgctagctcttccagccccctgtcatggcatcttccaggggtccgagagctcagctagtcttcttcctccaacccgggcccctatgtccacttcaggacagcatgtttgctgcctccagggatcctgtgtccccgagctgggaccaccttatattcccagggccggttaatgtggctctggttctgggtacttttatctgtcccctccaccccacagtggggcaagcttctgacctcttctcttcctcccacagggcctcgagagatctggcagcggagagggcagaggaagtcttctaacatgcggtgacgtggaggagaatcccggccctaggctcgagggtaccatgattgaacaagatggattgcacgcaggttctccggccgcttgggtggagaggctattcggctatgactgggcacaacagacaatcggctgctctgatgccgccgtgttccggctgtcagcgcaggggcgcccggttctttttgtcaagaccgacctgtccggtgccctgaatgaactgcaggacgaggcagcgcggctatcgtggctggccacgacgggcgttccttgcgcagctgtgctcgacgttgtcactgaagcgggaagggactggctgctattgggcgaagtgccggggcaggatctcctgtcatctcaccttgctcctgccgagaaagtatccatcatggctgatgcaatgcggcggctgcatacgcttgatccggctacctgcccattcgaccaccaagcgaaacatcgcatcgagcgagcacgtactcggatggaagccggtcttgtcgatcaggatgatctggacgaagagcatcaggggctcgcgccagccgaactgttcgccaggctcaaggcgcgcatgcccgacggcgaggatctcgtcgtgacccatggcgatgcctgcttgccgaatatcatggtggaaaatggccgcttttctggattcatcgactgtggccggctgggtgtggcggaccgctatcaggacatagcgttggctacccgtgatattgctgaagagcttggcggcgaatgggctgaccgcttcctcgtgctttacggtatcgccgctcccgattcgcagcgcatcgccttctatcgccttcttgacgagttcttctgagtttaaacccgctgatcagcctcgactgtgccttctagttgccagccatctgttgtttgcccctcccccgtgccttccttgaccctggaaggtgccactcccactgtcctttcctaataaaatgaggaaattgcatcgcattgtctgagtaggtgtcattctattctggggggtggggtggggcaggacagcaagggggaggattgggaagacaatagcaggcatgctggggatgcggtgggctctatgggctagcggtggcggcctcgacattgattattgactagtagatctggcgcgccgcctttttacggttcctggccttttgctggccttttgctcacatgtcacgtgaggccttaacgtctcgccctttggtctccccctcttaagtaccacatttgtagaggttttacttgctttaaaaaacctcccacacctccccctgaacctgaaacataaaatgaatgcaattgttgttgttaacttgtttattgcagcttataatggttacaaataaagcaatagcatcacaaatttcacaaataaagcatttttttcactgcattctagttgtggtttgtccaaactcatcggctagcttacccggggagcatgtcaaggtcaaaatcgtcaagagcgtcagcaggcagcatatcaaggtcaaagtcgtcaagggcatcggctgggagcatgtctaagtcaaaatcgtcaagggcgtcggtcggcccgccgctttcgcactttagctgtttctccaggccacatatgattagttccaggccgaaaaggaaggcaggttcggctccctgccggtcgaacagctcaattgcttgtctcagaagtgggggcatagaatcggtggtaggtgtctctctttcctcttttgctacttgatgctcctgttcctccaatacgcagcccagtgtaaagtggcccacggcggacagagcgtacagtgcgttctccagggagaagccttgctgacacaggaacgcgagctgattttccagggtttcgtactgtttctctgttgggcgggtgccgagatgcactttagccccgtcgcgatgtgagaggagagcacagcggtatgacttggcgttgttccgcagaaagtcttgccatgactcgccttccagggggcagaagtgggtatgatgcctgtccagcatctcgattggcagggcatcgagcagggcccgcttgttcttcacgtgccagtacagggtaggctgctcaactcccagcttttgagcgagtttccttgtcgtcaggccttcgataccgacaccattgagtaattccagagctccgtttatgactttgctcttgtccagtctagacattggaccagggttttcttcaacatcaccacaagtgaggagagaacctctaccttcggcaccgggatttcgggtatatttgagtggaatgagttcttcaatcgtagttttgactaacttgccattcatttctattaacacaaaacaatctggtgcatagtctgaaatcaactccctacacataccacaaggacttaccactcgaatacttctatctacttcgtcagaataagggtgtctaacagctacaatcgtgtcaaaatccttttgtccattcgaaactgcactaccaatcgcaatggcttctgcacaaacagttactcgtcctatatacgcttcaatatgtactgccgaaatgatttctcctgttttcgtacgaattgccgctcccacatgatgtttattatcctcataaagcattgtaatcttctctgtcgctacttctactaattctagatcctgttgagaaatgttaaatgttttcatggtggcggcactagtaagggcgaattcggagcctgcttttttgtacaaacttgttgatatctgcagaattccaccacactggactagtggatccgagctcggtaccaagcttcttcacgacacctgaaatggaagaaaaaaactttgaaccactgtctgaggcttgagaatgaaccaagatccaaactcaaaaagggcaaattccaaggagaattacatcaagtgccaagctggcctaacttcagtctccacccactcagtgtggggaaactccatcgcataaaacccctccccccaacctaaagacgacgtactccaaaagctcgagaactaatcgaggtgcctggacggcgcccggtactccgtggagtcacatgaagcgacggctgaggacggaaaggcccttttcctttgtgtgggtgactcacccgcccgctctcccgagcgccgcgtcctccattttgagctccctgcagcagggccgggaagcggccatctttccgctcacgcaactggtgccgaccgggccagccttgccgcccagggcggggcgatacacggcggcgcgaggccaggcaccagagcaggccggccagcttgagactacccccgtccgattctcggtggccgcgctcgcaggccccgcctcgccgaacatgtgcgctgggacgcacgggccccgtcgccgcccgcggccccaaaaaccgaaataccagtgtgcagatcttggcccgcatttacaagactatcttgccagaaaaaaagcgtcgcagcaggtcatcaaaaattttaaatggctagagacttatcgaaagcagcgagacaggcgcgaaggtgccaccagattcgcacgcggcggccccagcgcccaggccaggcctcaactcaagcacgaggcgaaggggctccttaagcgcaaggcctcgaactctcccacccacttccaacccgaagctcgggatcaagaatcacgtactgcagccaggtggaagtaattcaaggcacgcaagggccataacccgtaaagaggccaggcccgcgggaaccacacacggcacttacctgtgttctggcggcaaacccgttgcgaaaaagaacgttcacggcgactactgcacttatatacggttctcccccaccctcgggaaaaaggcggagccagtacacgacatcactttcccagtttaccccgcgccaccttctctaggcaccggttcaattgccgacccctccccccaacttctcggggactgtgggcgatgtgcgctctgcccactgacgggcaccggagcctcacgatcgatatgtcgagtttactccctatcagtgatagagaacgtatgtcgagtttactccctatcagtgatagagaacgatgtcgagtttactccctatcagtgatagagaacgtatgtcgagtttactccctatcagtgatagagaacgtatgtcgagtttactccctatcagtgatagagaacgtatgtcgagtttatccctatcagtgatagagaacgtatgtcgagtttactccctatcagtgatagagaacgtatgtcgaggtaggcgtgtacggtgggaggcctatataagcagagctcgtttagtgaaccgtcagatcgcctggagaattggctaggcaccggtgacaagtttgtacaaaaaagcaggctccgaattcgcccttactagtgccgccaccatgaaaaagcctgaactcaccgcgacgtctgtcgagaagtttctgatcgaaaagttcgacagcgtctccgacctgatgcagctctcggagggcgaagaatctcgtgctttcagcttcgatgtaggagggcgtggatatgtcctgcgggtaaatagctgcgccgatggtttctacaaagatcgttatgtttatcggcactttgcatcggccgcgctcccgattccggaagtgcttgacattggggaatttagcgagagcctgacctattgcatctcccgccgtgcacagggtgtcacgttgcaagacctgcctgaaaccgaactgcccgctgttctgcagccggtcgcggaggccatggatgcgatcgctgcggccgatcttagccagacgagcgggttcggcccattcggaccgcaaggaatcggtcaatacactacatggcgtgatttcatatgcgcgattgctgatccccatgtgtatcactggcaaactgtgatggacgacaccgtcagtgcgtccgtcgcgcaggctctcgatgagctgatgctttgggccgaggactgccccgaagtccggcacctcgtgcacgcggatttcggctccaacaatgtcctgacggacaatggccgcataacagcggtcattgactggagcgaggcgatgttcggggattcccaatacgaggtcgccaacatcttcttctggaggccgtggttggcttgtatggagcagcagacgcgctacttcgagcggaggcatccggagcttgcaggatcgccgcggctccgggcgtatatgctccgcattggtcttgaccaactctatcagagcttggttgacggcaatttcgatgatgcagcttgggcgcagggtcgatgcgacgcaatcgtccgatccggagccgggactgtcgggcgtacacaaatcgcccgcagaagcgcggccgtctggaccgatggctgtgtagaagtactcgccgatagtggaaaccgacgccccagcactcgtccgagggcaaaggaaactagtggcagcggcgccacaaacttctctctgctaaagcaagcaggtgatgttgaagaaaaccccgggcctggcgcgccaatgaatacactcgagatggacatcatcagcgtggctctgaagaggcactccaccaaggctttcgacgcttccaagaaactgacccctgaacaggccgagcagatcaagaccctgctccagtacagccctagctccaccaacagccagccttggcacttcatcgtggctagcaccgaggaaggcaaagctagggtggctaagagcgccgctggcaactacgtgttcaacgagaggaagatgctggatgctagccacgtggtggtgttctgcgctaagaccgccatggacgatgtgtggctgaagctggtggtggatcaggaagatgctgatggcaggttcgctacccctgaagctaaggccgctaacgacaagggcaggaagttcttcgccgacatgcacaggaaggatctgcacgatgatgctgagtggatggccaagcaggtgtacctgaacgtgggcaacttcctgctcggcgtggctgccctgggcctcgatgctgtgcccatcgaaggcttcgatgctgctatcctggatgccgagttcggcctgaaggagaaaggctacaccagcctggtggtggtgcctgtgggccaccacagcgtggaggacttcaacgctaccctgcctaagagcaggctgccccagaacatcaccctgaccgaggtgggccggccaggctcgggccagtgtactaattatgctctcttgaaattggctggagatgttgagagcaacccaggtcccttaattaagatggtgagcaagggcgaggaggataacatggccatcatcaaggagttcatgcgcttcaaggtgcacatggagggctccgtgaacggccacgagttcgagatcgagggcgagggcgagggccgcccctacgagggcacccagaccgccaagctgaaggtgaccaagggtggccccctgcccttcgcctgggacatcctgtcccctcagttcatgtacggctccaaggcctacgtgaagcaccccgccgacatccccgactacttgaagctgtccttccccgagggcttcaagtgggagcgcgtgatgaacttcgaggacggcggcgtggtgaccgtgacccaggactcctccctgcaggacggcgagttcatctacaaggtgaagctgcgcggcaccaacttcccctccgacggccccgtaatgcagaagaagaccatgggctgggaggcctcctccgagcggatgtaccccgaggacggcgccctgaagggcgagatcaagcagaggctgaagctgaaggacggcggccactacgacgctgaggtcaagaccacctacaaggccaagaagcccgtgcagctgcccggcgcctacaacgtcaacatcaagttggacatcacctcccacaacgaggactacaccatcgtggaacagtacgaacgcgccgagggccgccactccaccggcggcatggacgagctgtacaagtaattaattaaaagggcgaattcgacccagctttcttgtacaaagtggttgatatccagcacagtggcggccgctcgagtctagagggcccgcggttcgaaggtaagcctatccctaaccctctcctcggtctcgattctacgcgtaccggttaggggcccgtttaaacccgctgatcagcctcgactgtgccttctagttgccagccatctgttgtttgcccctcccccgtgccttccttgaccctggaaggtgccactcccactgtcctttcctaataaaatgaggaaattgcatcgcattgtctgagtaggtgtcattctattctggggggtggggtggggcaggacagcaagggggaggattgggaagacaatagcaggcatgctggggatgcggtgggctctatggctctagaagtcgacagtactaagctttgacagaaaagccccatccttaggcctcctccttcctagtctcctgatattgggtctaacccccacctcctgttaggcagattccttatctggtgacacacccccatttcctggagccatctctctccttgccagaacctctaaggtttgcttacgatggagccagagaggatcctgggagggagagcttggcagggggtgggagggaagggggggatgcgtgacctgcccggttctcagtggccaccctgcgctaccctctcccagaacctgagctgctctgacgcggctgtctggtgcgtttcactgatcctggtgctgcagcttccttacacttcccaagaggagaagcagtttggaaaaacaaaatcagaataagttggtcctgagttctaactttggctcttcacctttctagtccccaatttatattgttcctccgtgcgtcagttttacctgtgagataaggccagtagccagccccgtcctggcagggctgtggtgaggaggggggtgtccgtgtggaaaactccctttgtgagaatggtgcgtcctaggtgttcaccaggtcgtggccgcctctactccctttctctttctccatccttctttccttaaagagtccccagtgctatctgggacatattcctccgcccagagcagggtcccgcttccctaaggccctgctctgggcttctgggtttgagtccttggcaagcccaggagaggcgctcaggcttccctgtcccccttcctcgtccaccatctcatgcccctggctctcctgccccttccctacaggggttcctggctctgctctagcgatcgccaattcgccctatagtgagtcgtattacaattcactggccgtcgttttacaacgtcgtgactgggaaaaccctggcgttacccaacttaatcgccttgcagcacatccccctttcgccagctggcgtaatagcgaagaggcccgcaccgatcgcccttcccaacagttgcgcagcctgaatggcgaatgggacgcgccctgtagcggcgcattaagcgcggcgggtgtggtggttacgcgcagcgtgaccgctacacttgccagcgccctagcgcccgctcctttcgctttcttcccttcctttctcgccacgttcgccggctttccccgtcaagctctaaatcgggggctccctttagggttccgatttagtgctttacggcacctcgaccccaaaaaacttgattagggtgatggttcacgtagtgggccatcgccctgatagacggtttttcgccctttgacgttggagtccacgttctttaatagtggactcttgttccaaactggaacaacactcaaccctatctcggtctattcttttgatttataagggattttgccgatttcggcctattggttaaaaaatgagctgatttaacaaaaatttaacgcgaattttaacaaaatattaacgcttacaatttaggtg

SEQ ID NO: 206 - DNA, 11497 bp, Artificial Sequence
  Synthetic Polynucleotide
gcacttttcggggaaatgtgcgcggaacccctatttgtttatttttctaaatacattcaaatatgtatccgctcatgagacaataaccctgataaatgcttcaataatattgaaaaaggaagagtatgagtattcaacatttccgtgtcgcccttattcccttttttgcggcattttgccttcctgtttttgctcacccagaaacgctggtgaaagtaaaagatgctgaagatcagttgggtgcacgagtgggttacatcgaactggatctcaacagcggtaagatccttgagagttttcgccccgaagaacgttttccaatgatgagcacttttaaagttctgctatgtggcgcggtattatcccgtattgacgccgggcaagagcaactcggtcgccgcatacactattctcagaatgacttggttgagtactcaccagtcacagaaaagcatcttacggatggcatgacagtaagagaattatgcagtgctgccataaccatgagtgataacactgcggccaacttacttctgacaacgatcggaggaccgaaggagctaaccgcttttttgcacaacatgggggatcatgtaactcgccttgatcgttgggaaccggagctgaatgaagccataccaaacgacgagcgtgacaccacgatgcctgtagcaatggcaacaacgttgcgcaaactattaactggcgaactacttactctagcttcccggcaacaattaatagactggatggaggcggataaagttgcaggaccacttctgcgctcggcccttccggctggctggtttattgctgataaatctggagccggtgagcgtgggtctcgcggtatcattgcagcactggggccagatggtaagccctcccgtatcgtagttatctacacgacggggagtcaggcaactatggatgaacgaaatagacagatcgctgagataggtgcctcactgattaagcattggtaactgtcagaccaagtttactcatatatactttagattgatttaaaacttcatttttaatttaaaaggatctaggtgaagatcctttttgataatctcatgaccaaaatcccttaacgtgagttttcgttccactgagcgtcagaccccgtagaaaagatcaaaggatcttcttgagatcctttttttctgcgcgtaatctgctgcttgcaaacaaaaaaaccaccgctaccagcggtggtttgtttgccggatcaagagctaccaactctttttccgaaggtaactggcttcagcagagcgcagataccaaatactgtccttctagtgtagccgtagttaggccaccacttcaagaactctgtagcaccgcctacatacctcgctctgctaatcctgttaccagtggctgctgccagtggcgataagtcgtgtcttaccgggttggactcaagacgatagttaccggataaggcgcagcggtcgggctgaacggggggttcgtgcacacagcccagcttggagcgaacgacctacaccgaactgagatacctacagcgtgagctatgagaaagcgccacgcttcccgaagggagaaaggcggacaggtatccggtaagcggcagggtcggaacaggagagcgcacgagggagcttccagggggaaacgcctggtatctttatagtcctgtcgggtttcgccacctctgacttgagcgtcgatttttgtgatgctcgtcaggggggcggagcctatggaaaaacgccagcaacgcggcctttttacggttcctggccttttgctggccttttgctcacatgttctttcctgcgttatcccctgattctgtggataaccgtattaccgcctttgagtgagctgataccgctcgccgcagccgaacgaccgagcgcagcgagtcagtgagcgaggaagcggaagagcgcccaatacgcaaaccgcctctccccgcgcgttggccgattcattaatgcagctggcacgacaggtttcccgactggaaagcgggcagtgagcgcaacgcaattaatgtgagttagctcactcattaggcaccccaggctttacactttatgcttccggctcgtatgttgtgtggaattgtgagcggataacaatttcacacaggaaacagctatgaccatgattacgccaagctcgaaattaaccctcactaaagggaacaaaagctgtgctttctctgaccagcattctctcccctgggcctgtgccgctttctgtctgcagcttgtggcctgggtcacctctacggctggcccagatccttccctgccgcctccttcaggttccgtcttcctccactccctcttccccttgctctctgctgtgttgctgcccaaggatgctctttccggagcacttccttctcggcgctgcaccacgtgatgtcctctgagcggatcctccccgtgtctgggtcctctccgggcatctctcctccctcacccaaccccatgccgtcttcactcgctgggttcccttttccttctccttctggggcctgtgccatctctcgtttcttaggatggccttctccgacggatgtctcccttgcgtcccgcctccccttcttgtaggcctgcatcatcaccgtttttctggacaaccccaaagtaccccgtctccctggctttagccacctctccatcctcttgctttctttgcctggacaccccgttctcctgtggattcgggtcacctctcactcctttcatttgggcagctcccctaccccccttacctctctagtctgtgctagctcttccagccccctgtcatggcatcttccaggggtccgagagctcagctagtcttcttcctccaacccgggcccctatgtccacttcaggacagcatgtttgctgcctccagggatcctgtgtccccgagctgggaccaccttatattcccagggccggttaatgtggctctggttctgggtacttttatctgtcccctccaccccacagtggggcaagcttctgacctcttctcttcctcccacagggcctcgagagatctggcagcggagagggcagaggaagtcttctaacatgcggtgacgtggaggagaatcccggccctaggctcgagggtaccatgattgaacaagatggattgcacgcaggttctccggccgcttgggtggagaggctattcggctatgactgggcacaacagacaatcggctgctctgatgccgccgtgttccggctgtcagcgcaggggcgcccggttctttttgtcaagaccgacctgtccggtgccctgaatgaactgcaggacgaggcagcgcggctatcgtggctggccacgacgggcgttccttgcgcagctgtgctcgacgttgtcactgaagcgggaagggactggctgctattgggcgaagtgccggggcaggatctcctgtcatctcaccttgctcctgccgagaaagtatccatcatggctgatgcaatgcggcggctgcatacgcttgatccggctacctgcccattcgaccaccaagcgaaacatcgcatcgagcgagcacgtactcggatggaagccggtcttgtcgatcaggatgatctggacgaagagcatcaggggctcgcgccagccgaactgttcgccaggctcaaggcgcgcatgcccgacggcgaggatctcgtcgtgacccatggcgatgcctgcttgccgaatatcatggtggaaaatggccgcttttctggattcatcgactgtggccggctgggtgtggcggaccgctatcaggacatagcgttggctacccgtgatattgctgaagagcttggcggcgaatgggctgaccgcttcctcgtgctttacggtatcgccgctcccgattcgcagcgcatcgccttctatcgccttcttgacgagttcttctgagtttaaacccgctgatcagcctcgactgtgccttctagttgccagccatctgttgtttgcccctcccccgtgccttccttgaccctggaaggtgccactcccactgtcctttcctaataaaatgaggaaattgcatcgcattgtctgagtaggtgtcattctattctggggggtggggtggggcaggacagcaagggggaggattgggaagacaatagcaggcatgctggggatgcggtgggctctatgggctagcggtggcggcctcgacattgattattgactagtagatctggcgcgccgcctttttacggttcctggccttttgctggccttttgctcacatgtcacgtgaggccttaacgtctcgccctttggtctccccctcttaagtaccacatttgtagaggttttacttgctttaaaaaacctcccacacctccccctgaacctgaaacataaaatgaatgcaattgttgttgttaacttgtttattgcagcttataatggttacaaataaagcaatagcatcacaaatttcacaaataaagcatttttttcactgcattctagttgtggtttgtccaaactcatcggctagcttacccggggagcatgtcaaggtcaaaatcgtcaagagcgtcagcaggcagcatatcaaggtcaaagtcgtcaagggcatcggctgggagcatgtctaagtcaaaatcgtcaagggcgtcggtcggcccgccgctttcgcactttagctgtttctccaggccacatatgattagttccaggccgaaaaggaaggcaggttcggctccctgccggtcgaacagctcaattgcttgtctcagaagtgggggcatagaatcggtggtaggtgtctctctttcctcttttgctacttgatgctcctgttcctccaatacgcagcccagtgtaaagtggcccacggcggacagagcgtacagtgcgttctccagggagaagccttgctgacacaggaacgcgagctgattttccagggtttcgtactgtttctctgttgggcgggtgccgagatgcactttagccccgtcgcgatgtgagaggagagcacagcggtatgacttggcgttgttccgcagaaagtcttgccatgactcgccttccagggggcagaagtgggtatgatgcctgtccagcatctcgattggcagggcatcgagcagggcccgcttgttcttcacgtgccagtacagggtaggctgctcaactcccagcttttgagcgagtttccttgtcgtcaggccttcgataccgacaccattgagtaattccagagctccgtttatgactttgctcttgtccagtctagacattggaccagggttttcttcaacatcaccacaagtgaggagagaacctctaccttcggcaccgggatttcgggtatatttgagtggaatgagttcttcaatcgtagttttgactaacttgccattcatttctattaacacaaaacaatctggtgcatagtctgaaatcaactccctacacataccacaaggacttaccactcgaatacttctatctacttcgtcagaataagggtgtctaacagctacaatcgtgtcaaaatccttttgtccattcgaaactgcactaccaatcgcaatggcttctgcacaaacagttactcgtcctatatacgcttcaatatgtactgccgaaatgatttctcctgttttcgtacgaattgccgctcccacatgatgtttattatcctcataaagcattgtaatcttctctgtcgctacttctactaattctagatcctgttgagaaatgttaaatgttttcatggtggcggcactagtaagggcgaattcggagcctgcttttttgtacaaacttgttgatatctgcagaattccaccacactggactagtggatccgagctcggtaccaagcttcttcacgacacctgaaatggaagaaaaaaactttgaaccactgtctgaggcttgagaatgaaccaagatccaaactcaaaaagggcaaattccaaggagaattacatcaagtgccaagctggcctaacttcagtctccacccactcagtgtggggaaactccatcgcataaaacccctccccccaacctaaagacgacgtactccaaaagctcgagaactaatcgaggtgcctggacggcgcccggtactccgtggagtcacatgaagcgacggctgaggacggaaaggcccttttcctttgtgtgggtgactcacccgcccgctctcccgagcgccgcgtcctccattttgagctccctgcagcagggccgggaagcggccatctttccgctcacgcaactggtgccgaccgggccagccttgccgcccagggcggggcgatacacggcggcgcgaggccaggcaccagagcaggccggccagcttgagactacccccgtccgattctcggtggccgcgctcgcaggccccgcctcgccgaacatgtgcgctgggacgcacgggccccgtcgccgcccgcggccccaaaaaccgaaataccagtgtgcagatcttggcccgcatttacaagactatcttgccagaaaaaaagcgtcgcagcaggtcatcaaaaattttaaatggctagagacttatcgaaagcagcgagacaggcgcgaaggtgccaccagattcgcacgcggcggccccagcgcccaggccaggcctcaactcaagcacgaggcgaaggggctccttaagcgcaaggcctcgaactctcccacccacttccaacccgaagctcgggatcaagaatcacgtactgcagccaggtggaagtaattcaaggcacgcaagggccataacccgtaaagaggccaggcccgcgggaaccacacacggcacttacctgtgttctggcggcaaacccgttgcgaaaaagaacgttcacggcgactactgcacttatatacggttctcccccaccctcgggaaaaaggcggagccagtacacgacatcactttcccagtttaccccgcgccaccttctctaggcaccggttcaattgccgacccctccccccaacttctcggggactgtgggcgatgtgcgctctgcccactgacgggcaccggagcctcacgatcgatatgtcgagtttactccctatcagtgatagagaacgtatgtcgagtttactccctatcagtgatagagaacgatgtcgagtttactccctatcagtgatagagaacgtatgtcgagtttactccctatcagtgatagagaacgtatgtcgagtttactccctatcagtgatagagaacgtatgtcgagtttatccctatcagtgatagagaacgtatgtcgagtttactccctatcagtgatagagaacgtatgtcgaggtaggcgtgtacggtgggaggcctatataagcagagctcgtttagtgaaccgtcagatcgcctggagaattggctaggcaccggtgacaagtttgtacaaaaaagcaggctccgaattcgcccttactagtgccgccaccatgaaaaagcctgaactcaccgcgacgtctgtcgagaagtttctgatcgaaaagttcgacagcgtctccgacctgatgcagctctcggagggcgaagaatctcgtgctttcagcttcgatgtaggagggcgtggatatgtcctgcgggtaaatagctgcgccgatggtttctacaaagatcgttatgtttatcggcactttgcatcggccgcgctcccgattccggaagtgcttgacattggggaatttagcgagagcctgacctattgcctttcatacgagaccgagatcctgactgtcgagtacggattgcttcctatcggcaaaatcgtggagaagaggattgaatgtaccgtctattcagtcgataataatgggaacatctacacacagcccgtggctcaatggcacgacagaggagagcaggaagtttttgaatactgtctcgaggacggatccctcatccgcgctactaaagatcataagtttatgaccgtggacggccagatgctgccaattgacgaaatttttgaacgagagctggatctgatgagagtcgacaaccttccaaacactagtggcagcggcgccacaaacttctctctgctaaagcaagcaggtgatgttgaagaaaaccccgggcctggcgcgccaatgaatacactcgagatggacatcatcagcgtggctctgaagaggcactccaccaaggctttcgacgcttccaagaaactgacccctgaacaggccgagcagatcaagaccctgctccagtacagccctagctccaccaacagccagccttggcacttcatcgtggctagcaccgaggaaggcaaagctagggtggctaagagcgccgctggcaactacgtgttcaacgagaggaagatgctggatgctagccacgtggtggtgttctgcgctaagaccgccatggacgatgtgtggctgaagctggtggtggatcaggaagatgctgatggcaggttcgctacccctgaagctaaggccgctaacgacaagggcaggaagttcttcgccgacatgcacaggaaggatctgcacgatgatgctgagtggatggccaagcaggtgtacctgaacgtgggcaacttcctgctcggcgtggctgccctgggcctcgatgctgtgcccatcgaaggcttcgatgctgctatcctggatgccgagttcggcctgaaggagaaaggctacaccagcctggtggtggtgcctgtgggccaccacagcgtggaggacttcaacgctaccctgcctaagagcaggctgccccagaacatcaccctgaccgaggtgggccggccaggctcgggccagtgtactaattatgctctcttgaaattggctggagatgttgagagcaacccaggtcccttaattaagatggtgagcaagggcgaggagctgttcaccggggtggtgcccatcctggtcgagctggacggcgacgtaaacggccacaagttcagcgtgtccggcgagggcgagggcgatgccacctacggcaagctgaccctgaagttcatctgcaccaccggcaagctgcccgtgccctggcccaccctcgtgaccaccctgacctacggcgtgcagtgcttcagccgctaccccgaccacatgaagcagcacgacttcttcaagtccgccatgcccgaaggctacgtccaggagcgcaccatcttcttcaaggacgacggcaactacaagacccgcgccgaggtgaagttcgagggcgacaccctggtgaaccgcatcgagctgaagggcatcgacttcaaggaggacggcaacatcctggggcacaagctggagtacaactacaacagccacaacgtctatatcatggccgacaagcagaagaacggcatcaaggtgaacttcaagatccgccacaacatcgaggacggcagcgtgcagctcgccgaccactaccagcagaacacccccatcggcgacggccccgtgctgctgcccgacaaccactacctgagcacccagtccgccctgagcaaagaccccaacgagaagcgcgatcacatggtcctgctggagttcgtgaccgccgccgggatcactctcggcatggacgagctgtacaagtaattaattaagagggcgaattcgacccagctttcttgtacaaagtggttgatatccagcacagtggcggccgctcgagtctagagggcccgcggttcgaaggtaagcctatccctaaccctctcctcggtctcgattctacgcgtaccggttaggggcccgtttaaacccgctgatcagcctcgactgtgccttctagttgccagccatctgttgtttgcccctcccccgtgccttccttgaccctggaaggtgccactcccactgtcctttcctaataaaatgaggaaattgcatcgcattgtctgagtaggtgtcattctattctggggggtggggtggggcaggacagcaagggggaggattgggaagacaatagcaggcatgctggggatgcggtgggctctatggctctagaagtcgacagtactaagctttgacagaaaagccccatccttaggcctcctccttcctagtctcctgatattgggtctaacccccacctcctgttaggcagattccttatctggtgacacacccccatttcctggagccatctctctccttgccagaacctctaaggtttgcttacgatggagccagagaggatcctgggagggagagcttggcagggggtgggagggaagggggggatgcgtgacctgcccggttctcagtggccaccctgcgctaccctctcccagaacctgagctgctctgacgcggctgtctggtgcgtttcactgatcctggtgctgcagcttccttacacttcccaagaggagaagcagtttggaaaaacaaaatcagaataagttggtcctgagttctaactttggctcttcacctttctagtccccaatttatattgttcctccgtgcgtcagttttacctgtgagataaggccagtagccagccccgtcctggcagggctgtggtgaggaggggggtgtccgtgtggaaaactccctttgtgagaatggtgcgtcctaggtgttcaccaggtcgtggccgcctctactccctttctctttctccatccttctttccttaaagagtccccagtgctatctgggacatattcctccgcccagagcagggtcccgcttccctaaggccctgctctgggcttctgggtttgagtccttggcaagcccaggagaggcgctcaggcttccctgtcccccttcctcgtccaccatctcatgcccctggctctcctgccccttccctacaggggttcctggctctgctctagcgatcgccaattcgccctatagtgagtcgtattacaattcactggccgtcgttttacaacgtcgtgactgggaaaaccctggcgttacccaacttaatcgccttgcagcacatccccctttcgccagctggcgtaatagcgaagaggcccgcaccgatcgcccttcccaacagttgcgcagcctgaatggcgaatgggacgcgccctgtagcggcgcattaagcgcggcgggtgtggtggttacgcgcagcgtgaccgctacacttgccagcgccctagcgcccgctcctttcgctttcttcccttcctttctcgccacgttcgccggctttccccgtcaagctctaaatcgggggctccctttagggttccgatttagtgctttacggcacctcgaccccaaaaaacttgattagggtgatggttcacgtagtgggccatcgccctgatagacggtttttcgccctttgacgttggagtccacgttctttaatagtggactcttgttccaaactggaacaacactcaaccctatctcggtctattcttttgatttataagggattttgccgatttcggcctattggttaaaaaatgagctgatttaacaaaaatttaacgcgaattttaacaaaatattaacgcttacaatttaggtg

SEQ ID NO: 207 - DNA, 11779 bp, Artificial Sequence
  Synthetic Polynucleotide
gcacttttcggggaaatgtgcgcggaacccctatttgtttatttttctaaatacattcaaatatgtatccgctcatgagacaataaccctgataaatgcttcaataatattgaaaaaggaagagtatgagtattcaacatttccgtgtcgcccttattcccttttttgcggcattttgccttcctgtttttgctcacccagaaacgctggtgaaagtaaaagatgctgaagatcagttgggtgcacgagtgggttacatcgaactggatctcaacagcggtaagatccttgagagttttcgccccgaagaacgttttccaatgatgagcacttttaaagttctgctatgtggcgcggtattatcccgtattgacgccgggcaagagcaactcggtcgccgcatacactattctcagaatgacttggttgagtactcaccagtcacagaaaagcatcttacggatggcatgacagtaagagaattatgcagtgctgccataaccatgagtgataacactgcggccaacttacttctgacaacgatcggaggaccgaaggagctaaccgcttttttgcacaacatgggggatcatgtaactcgccttgatcgttgggaaccggagctgaatgaagccataccaaacgacgagcgtgacaccacgatgcctgtagcaatggcaacaacgttgcgcaaactattaactggcgaactacttactctagcttcccggcaacaattaatagactggatggaggcggataaagttgcaggaccacttctgcgctcggcccttccggctggctggtttattgctgataaatctggagccggtgagcgtgggtctcgcggtatcattgcagcactggggccagatggtaagccctcccgtatcgtagttatctacacgacggggagtcaggcaactatggatgaacgaaatagacagatcgctgagataggtgcctcactgattaagcattggtaactgtcagaccaagtttactcatatatactttagattgatttaaaacttcatttttaatttaaaaggatctaggtgaagatcctttttgataatctcatgaccaaaatcccttaacgtgagttttcgttccactgagcgtcagaccccgtagaaaagatcaaaggatcttcttgagatcctttttttctgcgcgtaatctgctgcttgcaaacaaaaaaaccaccgctaccagcggtggtttgtttgccggatcaagagctaccaactctttttccgaaggtaactggcttcagcagagcgcagataccaaatactgtccttctagtgtagccgtagttaggccaccacttcaagaactctgtagcaccgcctacatacctcgctctgctaatcctgttaccagtggctgctgccagtggcgataagtcgtgtcttaccgggttggactcaagacgatagttaccggataaggcgcagcggtcgggctgaacggggggttcgtgcacacagcccagcttggagcgaacgacctacaccgaactgagatacctacagcgtgagctatgagaaagcgccacgcttcccgaagggagaaaggcggacaggtatccggtaagcggcagggtcggaacaggagagcgcacgagggagcttccagggggaaacgcctggtatctttatagtcctgtcgggtttcgccacctctgacttgagcgtcgatttttgtgatgctcgtcaggggggcggagcctatggaaaaacgccagcaacgcggcctttttacggttcctggccttttgctggccttttgctcacatgttctttcctgcgttatcccctgattctgtggataaccgtattaccgcctttgagtgagctgataccgctcgccgcagccgaacgaccgagcgcagcgagtcagtgagcgaggaagcggaagagcgcccaatacgcaaaccgcctctccccgcgcgttggccgattcattaatgcagctggcacgacaggtttcccgactggaaagcgggcagtgagcgcaacgcaattaatgtgagttagctcactcattaggcaccccaggctttacactttatgcttccggctcgtatgttgtgtggaattgtgagcggataacaatttcacacaggaaacagctatgaccatgattacgccaagctcgaaattaaccctcactaaagggaacaaaagctgtgctttctctgaccagcattctctcccctgggcctgtgccgctttctgtctgcagcttgtggcctgggtcacctctacggctggcccagatccttccctgccgcctccttcaggttccgtcttcctccactccctcttccccttgctctctgctgtgttgctgcccaaggatgctctttccggagcacttccttctcggcgctgcaccacgtgatgtcctctgagcggatcctccccgtgtctgggtcctctccgggcatctctcctccctcacccaaccccatgccgtcttcactcgctgggttcccttttccttctccttctggggcctgtgccatctctcgtttcttaggatggccttctccgacggatgtctcccttgcgtcccgcctccccttcttgtaggcctgcatcatcaccgtttttctggacaaccccaaagtaccccgtctccctggctttagccacctctccatcctcttgctttctttgcctggacaccccgttctcctgtggattcgggtcacctctcactcctttcatttgggcagctcccctaccccccttacctctctagtctgtgctagctcttccagccccctgtcatggcatcttccaggggtccgagagctcagctagtcttcttcctccaacccgggcccctatgtccacttcaggacagcatgtttgctgcctccagggatcctgtgtccccgagctgggaccaccttatattcccagggccggttaatgtggctctggttctgggtacttttatctgtcccctccaccccacagtggggcaagcttctgacctcttctcttcctcccacagggcctcgagagatctggcagcggagagggcagaggaagtcttctaacatgcggtgacgtggaggagaatcccggccctaggctcgagggtaccatgattgaacaagatggattgcacgcaggttctccggccgcttgggtggagaggctattcggctatgactgggcacaacagacaatcggctgctctgatgccgccgtgttccggctgtcagcgcaggggcgcccggttctttttgtcaagaccgacctgtccggtgccctgaatgaactgcaggacgaggcagcgcggctatcgtggctggccacgacgggcgttccttgcgcagctgtgctcgacgttgtcactgaagcgggaagggactggctgctattgggcgaagtgccggggcaggatctcctgtcatctcaccttgctcctgccgagaaagtatccatcatggctgatgcaatgcggcggctgcatacgcttgatccggctacctgcccattcgaccaccaagcgaaacatcgcatcgagcgagcacgtactcggatggaagccggtcttgtcgatcaggatgatctggacgaagagcatcaggggctcgcgccagccgaactgttcgccaggctcaaggcgcgcatgcccgacggcgaggatctcgtcgtgacccatggcgatgcctgcttgccgaatatcatggtggaaaatggccgcttttctggattcatcgactgtggccggctgggtgtggcggaccgctatcaggacatagcgttggctacccgtgatattgctgaagagcttggcggcgaatgggctgaccgcttcctcgtgctttacggtatcgccgctcccgattcgcagcgcatcgccttctatcgccttcttgacgagttcttctgagtttaaacccgctgatcagcctcgactgtgccttctagttgccagccatctgttgtttgcccctcccccgtgccttccttgaccctggaaggtgccactcccactgtcctttcctaataaaatgaggaaattgcatcgcattgtctgagtaggtgtcattctattctggggggtggggtggggcaggacagcaagggggaggattgggaagacaatagcaggcatgctggggatgcggtgggctctatgggctagcggtggcggcctcgacattgattattgactagtagatctggcgcgccgcctttttacggttcctggccttttgctggccttttgctcacatgtcacgtgaggccttaacgtctcgccctttggtctccccctcttaagtaccacatttgtagaggttttacttgctttaaaaaacctcccacacctccccctgaacctgaaacataaaatgaatgcaattgttgttgttaacttgtttattgcagcttataatggttacaaataaagcaatagcatcacaaatttcacaaataaagcatttttttcactgcattctagttgtggtttgtccaaactcatcggctagcttacccggggagcatgtcaaggtcaaaatcgtcaagagcgtcagcaggcagcatatcaaggtcaaagtcgtcaagggcatcggctgggagcatgtctaagtcaaaatcgtcaagggcgtcggtcggcccgccgctttcgcactttagctgtttctccaggccacatatgattagttccaggccgaaaaggaaggcaggttcggctccctgccggtcgaacagctcaattgcttgtctcagaagtgggggcatagaatcggtggtaggtgtctctctttcctcttttgctacttgatgctcctgttcctccaatacgcagcccagtgtaaagtggcccacggcggacagagcgtacagtgcgttctccagggagaagccttgctgacacaggaacgcgagctgattttccagggtttcgtactgtttctctgttgggcgggtgccgagatgcactttagccccgtcgcgatgtgagaggagagcacagcggtatgacttggcgttgttccgcagaaagtcttgccatgactcgccttccagggggcagaagtgggtatgatgcctgtccagcatctcgattggcagggcatcgagcagggcccgcttgttcttcacgtgccagtacagggtaggctgctcaactcccagcttttgagcgagtttccttgtcgtcaggccttcgataccgacaccattgagtaattccagagctccgtttatgactttgctcttgtccagtctagacattggaccagggttttcttcaacatcaccacaagtgaggagagaacctctaccttcggcaccgggatttcgggtatatttgagtggaatgagttcttcaatcgtagttttgactaacttgccattcatttctattaacacaaaacaatctggtgcatagtctgaaatcaactccctacacataccacaaggacttaccactcgaatacttctatctacttcgtcagaataagggtgtctaacagctacaatcgtgtcaaaatccttttgtccattcgaaactgcactaccaatcgcaatggcttctgcacaaacagttactcgtcctatatacgcttcaatatgtactgccgaaatgatttctcctgttttcgtacgaattgccgctcccacatgatgtttattatcctcataaagcattgtaatcttctctgtcgctacttctactaattctagatcctgttgagaaatgttaaatgttttcatggtggcggcactagtaagggcgaattcggagcctgcttttttgtacaaacttgttgatatctgcagaattccaccacactggactagtggatccgagctcggtaccaagcttcttcacgacacctgaaatggaagaaaaaaactttgaaccactgtctgaggcttgagaatgaaccaagatccaaactcaaaaagggcaaattccaaggagaattacatcaagtgccaagctggcctaacttcagtctccacccactcagtgtggggaaactccatcgcataaaacccctccccccaacctaaagacgacgtactccaaaagctcgagaactaatcgaggtgcctggacggcgcccggtactccgtggagtcacatgaagcgacggctgaggacggaaaggcccttttcctttgtgtgggtgactcacccgcccgctctcccgagcgccgcgtcctccattttgagctccctgcagcagggccgggaagcggccatctttccgctcacgcaactggtgccgaccgggccagccttgccgcccagggcggggcgatacacggcggcgcgaggccaggcaccagagcaggccggccagcttgagactacccccgtccgattctcggtggccgcgctcgcaggccccgcctcgccgaacatgtgcgctgggacgcacgggccccgtcgccgcccgcggccccaaaaaccgaaataccagtgtgcagatcttggcccgcatttacaagactatcttgccagaaaaaaagcgtcgcagcaggtcatcaaaaattttaaatggctagagacttatcgaaagcagcgagacaggcgcgaaggtgccaccagattcgcacgcggcggccccagcgcccaggccaggcctcaactcaagcacgaggcgaaggggctccttaagcgcaaggcctcgaactctcccacccacttccaacccgaagctcgggatcaagaatcacgtactgcagccaggtggaagtaattcaaggcacgcaagggccataacccgtaaagaggccaggcccgcgggaaccacacacggcacttacctgtgttctggcggcaaacccgttgcgaaaaagaacgttcacggcgactactgcacttatatacggttctcccccaccctcgggaaaaaggcggagccagtacacgacatcactttcccagtttaccccgcgccaccttctctaggcaccggttcaattgccgacccctccccccaacttctcggggactgtgggcgatgtgcgctctgcccactgacgggcaccggagcctcacgatcgatatgtcgagtttactccctatcagtgatagagaacgtatgtcgagtttactccctatcagtgatagagaacgatgtcgagtttactccctatcagtgatagagaacgtatgtcgagtttactccctatcagtgatagagaacgtatgtcgagtttactccctatcagtgatagagaacgtatgtcgagtttatccctatcagtgatagagaacgtatgtcgagtttactccctatcagtgatagagaacgtatgtcgaggtaggcgtgtacggtgggaggcctatataagcagagctcgtttagtgaaccgtcagatcgcctggagaattggctaggcaccggtgacaagtttgtacaaaaaagcaggctccgaattcgcccttactagtgccgccaccatgattaagatcgctacgcggaagtacctggggaaacagaacgtctacgacataggtgtggagcgcgatcacaactttgctctgaaaaatggatttatcgccagcaactgcatctcccgccgtgcacagggtgtcacgttgcaagacctgcctgaaaccgaactgcccgctgttctgcagccggtcgcggaggccatggatgcgatcgctgcggccgatcttagccagacgagcgggttcggcccattcggaccgcaaggaatcggtcaatacactacatggcgtgatttcatatgcgcgattgctgatccccatgtgtatcactggcaaactgtgatggacgacaccgtcagtgcgtccgtcgcgcaggctctcgatgagctgatgctttgggccgaggactgccccgaagtccggcacctcgtgcacgcggatttcggctccaacaatgtcctgacggacaatggccgcataacagcggtcattgactggagcgaggcgatgttcggggattcccaatacgaggtcgccaacatcttcttctggaggccgtggttggcttgtatggagcagcagacgcgctacttcgagcggaggcatccggagcttgcaggatcgccgcggctccgggcgtatatgctccgcattggtcttgaccaactctatcagagcttggttgacggcaatttcgatgatgcagcttgggcgcagggtcgatgcgacgcaatcgtccgatccggagccgggactgtcgggcgtacacaaatcgcccgcagaagcgcggccgtctggaccgatggctgtgtagaagtactcgccgatagtggaaaccgacgccccagcactcgtccgagggcaaaggaaactagtggcagcggcgccacaaacttctctctgctaaagcaagcaggtgatgttgaagaaaaccccgggcctggcgcgccaatgaatacactcgagatggacatcatcagcgtggctctgaagaggcactccaccaaggctttcgacgcttccaagaaactgacccctgaacaggccgagcagatcaagaccctgctccagtacagccctagctccaccaacagccagccttggcacttcatcgtggctagcaccgaggaaggcaaagctagggtggctaagagcgccgctggcaactacgtgttcaacgagaggaagatgctggatgctagccacgtggtggtgttctgcgctaagaccgccatggacgatgtgtggctgaagctggtggtggatcaggaagatgctgatggcaggttcgctacccctgaagctaaggccgctaacgacaagggcaggaagttcttcgccgacatgcacaggaaggatctgcacgatgatgctgagtggatggccaagcaggtgtacctgaacgtgggcaacttcctgctcggcgtggctgccctgggcctcgatgctgtgcccatcgaaggcttcgatgctgctatcctggatgccgagttcggcctgaaggagaaaggctacaccagcctggtggtggtgcctgtgggccaccacagcgtggaggacttcaacgctaccctgcctaagagcaggctgccccagaacatcaccctgaccgaggtgggccggccaggctcgggccagtgtactaattatgctctcttgaaattggctggagatgttgagagcaacccaggtcccttaattaagatggtgagcaagggcgaggaggataacatggccatcatcaaggagttcatgcgcttcaaggtgcacatggagggctccgtgaacggccacgagttcgagatcgagggcgagggcgagggccgcccctacgagggcacccagaccgccaagctgaaggtgaccaagggtggccccctgcccttcgcctgggacatcctgtcccctcagttcatgtacggctccaaggcctacgtgaagcaccccgccgacatccccgactacttgaagctgtccttccccgagggcttcaagtgggagcgcgtgatgaacttcgaggacggcggcgtggtgaccgtgacccaggactcctccctgcaggacggcgagttcatctacaaggtgaagctgcgcggcaccaacttcccctccgacggccccgtaatgcagaagaagaccatgggctgggaggcctcctccgagcggatgtaccccgaggacggcgccctgaagggcgagatcaagcagaggctgaagctgaaggacggcggccactacgacgctgaggtcaagaccacctacaaggccaagaagcccgtgcagctgcccggcgcctacaacgtcaacatcaagttggacatcacctcccacaacgaggactacaccatcgtggaacagtacgaacgcgccgagggccgccactccaccggcggcatggacgagctgtacaagtaattaattaaaagggcgaattcgacccagctttcttgtacaaagtggttgatatccagcacagtggcggccgctcgagtctagagggcccgcggttcgaaggtaagcctatccctaaccctctcctcggtctcgattctacgcgtaccggttaggggcccgtttaaacccgctgatcagcctcgactgtgccttctagttgccagccatctgttgtttgcccctcccccgtgccttccttgaccctggaaggtgccactcccactgtcctttcctaataaaatgaggaaattgcatcgcattgtctgagtaggtgtcattctattctggggggtggggtggggcaggacagcaagggggaggattgggaagacaatagcaggcatgctggggatgcggtgggctctatggctctagaagtcgacagtactaagctttgacagaaaagccccatccttaggcctcctccttcctagtctcctgatattgggtctaacccccacctcctgttaggcagattccttatctggtgacacacccccatttcctggagccatctctctccttgccagaacctctaaggtttgcttacgatggagccagagaggatcctgggagggagagcttggcagggggtgggagggaagggggggatgcgtgacctgcccggttctcagtggccaccctgcgctaccctctcccagaacctgagctgctctgacgcggctgtctggtgcgtttcactgatcctggtgctgcagcttccttacacttcccaagaggagaagcagtttggaaaaacaaaatcagaataagttggtcctgagttctaactttggctcttcacctttctagtccccaatttatattgttcctccgtgcgtcagttttacctgtgagataaggccagtagccagccccgtcctggcagggctgtggtgaggaggggggtgtccgtgtggaaaactccctttgtgagaatggtgcgtcctaggtgttcaccaggtcgtggccgcctctactccctttctctttctccatccttctttccttaaagagtccccagtgctatctgggacatattcctccgcccagagcagggtcccgcttccctaaggccctgctctgggcttctgggtttgagtccttggcaagcccaggagaggcgctcaggcttccctgtcccccttcctcgtccaccatctcatgcccctggctctcctgccccttccctacaggggttcctggctctgctctagcgatcgccaattcgccctatagtgagtcgtattacaattcactggccgtcgttttacaacgtcgtgactgggaaaaccctggcgttacccaacttaatcgccttgcagcacatccccctttcgccagctggcgtaatagcgaagaggcccgcaccgatcgcccttcccaacagttgcgcagcctgaatggcgaatgggacgcgccctgtagcggcgcattaagcgcggcgggtgtggtggttacgcgcagcgtgaccgctacacttgccagcgccctagcgcccgctcctttcgctttcttcccttcctttctcgccacgttcgccggctttccccgtcaagctctaaatcgggggctccctttagggttccgatttagtgctttacggcacctcgaccccaaaaaacttgattagggtgatggttcacgtagtgggccatcgccctgatagacggtttttcgccctttgacgttggagtccacgttctttaatagtggactcttgttccaaactggaacaacactcaaccctatctcggtctattcttttgatttataagggattttgccgatttcggcctattggttaaaaaatgagctgatttaacaaaaatttaacgcgaattttaacaaaatattaacgcttacaatttaggtg

SEQ ID NO: 208 - DNA, 9330 bp, Artificial Sequence
  Synthetic Polynucleotide
cccggggttattaatagtaatcaattacggggtcattagttcatagcccatatatggagttccgcgttacataacttacggtaaatggcccgcctggctgaccgcccaacgacccccgcccattgacgtcaataatgacgtatgttcccatagtaacgccaatagggactttccattgacgtcaatgggtggagtatttacggtaaactgcccacttggcagtacatcaagtgtatcatatgccaagtacgccccctattgacgtcaatgacggtaaatggcccgcctggcattatgcccagtacatgaccttatgggactttcctacttggcagtacatctacgtattagtcatcgctattaccatggtgatgcggttttggcagtacatcaatgggcgtggatagcggtttgactcacggggatttccaagtctccaccccattgacgtcaatgggagtttgttttggcaccaaaatcaacgggactttccaaaatgtcgtaacaactccgccccattgacgcaaatgggcggtaggcgtgtacggtgggaggtctatataagcagagctctctggctaactgtcgggatcaacaagtttgtacaaaaaagcaggctccgaattcaccggtgccaccatgaaaaagcctgaactcaccgcgacgtctgtcgagaagtttctgatcgaaaagttcgacagcgtctccgacctgatgcagctctcggagggcgaagaatctcgtgctttcagcttcgatgtaggagggcgtggatatgtcctgcgggtaaatagctgcgccgatggtttctacaaagatcgttatgtttatcggcactttgcatcggccgcgctcccgattccggaagtgcttgacattggggaatttagcgagagcctgacctattgcctttcatacgagaccgagatcctgactgtcgagtacggattgcttcctatcggcaaaatcgtggagaagaggattgaatgtaccgtctattcagtcgataataatgggaacatctacacacagcccgtggctcaatggcacgacagaggagagcaggaagtttttgaatactgtctcgaggacggatccctcatccgcgctactaaagatcataagtttatgaccgtggacggccagatgctgccaattgacgaaatttttgaacgagagctggatctgatgagagtcgacaaccttccaaacggtggaggggggtcaggctctgcgcagctggaaaaggagcttcaagccctcgaaaaaaagttggcccagctcgagtgggagaaccaggctctggagaaagaactggcccagtgattaattaagaattcgacccagctttcttgtacaaagtggttggtaagcctatccctaaccctctcctcggtctcgattctacgtagtaatgagctagcagtctcgaggttaacgaattccgccccccccctaacgttactggccgaagccgcttggaataaggccggtgtgcgcttgtctatatgttattttccaccatattgccgtcttttggcaatgtgagggcccggaaacctggccctgtcttcttgacgagcattcctaggggtctttcccctctcgccaaaggaatgcaaggtctgttgaatgtcgtgaaggaagcagttcctctggaagcttcttgaagacaaacaacgtctgtagcgaccctttgcaggcagcggaaccccccacctggcgacaggtgcccctgcggccaaaagccacgtgtataagatacacctgcaaaggcggcacaaccccagtgccacgttgtgagttggatagttgtggaaagagtcaaatggctctcctcaagcgtattcaacaaggggctgaaggatgcccagaaggtaccccattgtatgggatctgatctggggcctcggtgcacatgctttacatgtgtttagtcgaggttaaaaaaacgtctaggccccccgaaccacggggacgtggttttcctttgaaaaacacgataataccatggccatgagcgagctgattaaggagaacatgcacatgaagctgtacatggagggcaccgtggacaaccatcacttcaagtgcacatccgagggcgaaggcaagccctacgagggcacccagaccatgagaatcaaggtggtcgagggcggccctctccccttcgccttcgacatcctggctactagcttcctctacggcagcaagaccttcatcaaccacacccagggcatccccgacttcttcaagcagtccttccctgagggcttcacatgggagagagtcaccacatacgaagacgggggcgtgctgaccgctacccaggacaccagcctccaggacggctgcctcatctacaacgtcaagatcagaggggtgaacttcacatccaacggccctgtgatgcagaagaaaacactcggctgggaggccttcaccgagacgctgtaccccgctgacggcggcctggaaggcagaaacgacatggccctgaagctcgtgggcgggagccatctgatcgcaaacatcaagaccacatatagatccaagaaacccgctaagaacctcaagatgcctggcgtctactatgtggactacagactggaaagaatcaaggaggccaacaacgagacctacgtcgagcagcacgaggtggcagtggccagatactgcgacctccctagcaaactggggcacaagcttaattaacaccggtggcgcgttaagtcgacaatcaacctctggattacaaaatttgtgaaagattgactggtattcttaactatgttgctccttttacgctatgtggatacgctgctttaatgcctttgtatcatgctattgcttcccgtatggctttcattttctcctccttgtataaatcctggttgctgtctctttatgaggagttgtggcccgttgtcaggcaacgtggcgtggtgtgcactgtgtttgctgacgcaacccccactggttggggcattgccaccacctgtcagctcctttccgggactttcgctttccccctccctattgccacggcggaactcatcgccgcctgccttgcccgctgctggacaggggctcggctgttgggcactgacaattccgtggtgttgtcggggaaatcatcgtcctttccttggctgctcgcctgtgttgccacctggattctgcgcgggacgtccttctgctacgtcccttcggccctcaatccagcggaccttccttcccgcggcctgctgccggctctgcggcctcttccgcgtcttcgccttcgccctcagacgagtcggatctccctttgggccgcctccccgcgtcgactttaagaccaatgacttacaaggcagctgtagatcttagccactttttaaaagaaaaggggggactggaagggctaattcactcccaacgaagacaagatctgctttttgcttgtactgggtctctctggttagaccagatctgagcctgggagctctctggctaactagggaacccactgcttaagcctcaataaagcttgccttgagtgcttcaagtagtgtgtgcccgtctgttgtgtgactctggtaactagagatccctcagacccttttagtcagtgtggaaaatctctagcagtacgtatagtagttcatgtcatcttattattcagtatttataacttgcaaagaaatgaatatcagagagtgagaggaacttgtttattgcagcttataatggttacaaataaagcaatagcatcacaaatttcacaaataaagcatttttttcactgcattctagttgtggtttgtccaaactcatcaatgtatcttatcatgtctggctctagctatcccgcccctaactccgcccatcccgcccctaactccgcccagttccgcccattctccgccccatggctgactaattttttttatttatgcagaggccgaggccgcctcggcctctgagctattccagaagtagtgaggaggcttttttggaggcctagggacgtacccaattcgccctatagtgagtcgtattacgcgcgctcactggccgtcgttttacaacgtcgtgactgggaaaaccctggcgttacccaacttaatcgccttgcagcacatccccctttcgccagctggcgtaatagcgaagaggcccgcaccgatcgcccttcccaacagttgcgcagcctgaatggcgaatgggacgcgccctgtagcggcgcattaagcgcggcgggtgtggtggttacgcgcagcgtgaccgctacacttgccagcgccctagcgcccgctcctttcgctttcttcccttcctttctcgccacgttcgccggctttccccgtcaagctctaaatcgggggctccctttagggttccgatttagtgctttacggcacctcgaccccaaaaaacttgattagggtgatggttcacgtagtgggccatcgccctgatagacggtttttcgccctttgacgttggagtccacgttctttaatagtggactcttgttccaaactggaacaacactcaaccctatctcggtctattcttttgatttataagggattttgccgatttcggcctattggttaaaaaatgagctgatttaacaaaaatttaacgcgaattttaacaaaatattaacgcttacaatttaggtggcacttttcggggaaatgtgcgcggaacccctatttgtttatttttctaaatacattcaaatatgtatccgctcatgagacaataaccctgataaatgcttcaataatattgaaaaaggaagagtatgagtattcaacatttccgtgtcgcccttattcccttttttgcggcattttgccttcctgtttttgctcacccagaaacgctggtgaaagtaaaagatgctgaagatcagttgggtgcacgagtgggttacatcgaactggatctcaacagcggtaagatccttgagagttttcgccccgaagaacgttttccaatgatgagcacttttaaagttctgctatgtggcgcggtattatcccgtattgacgccgggcaagagcaactcggtcgccgcatacactattctcagaatgacttggttgagtactcaccagtcacagaaaagcatcttacggatggcatgacagtaagagaattatgcagtgctgccataaccatgagtgataacactgcggccaacttacttctgacaacgatcggaggaccgaaggagctaaccgcttttttgcacaacatgggggatcatgtaactcgccttgatcgttgggaaccggagctgaatgaagccataccaaacgacgagcgtgacaccacgatgcctgtagcaatggcaacaacgttgcgcaaactattaactggcgaactacttactctagcttcccggcaacaattaatagactggatggaggcggataaagttgcaggaccacttctgcgctcggcccttccggctggctggtttattgctgataaatctggagccggtgagcgtgggtctcgcggtatcattgcagcactggggccagatggtaagccctcccgtatcgtagttatctacacgacggggagtcaggcaactatggatgaacgaaatagacagatcgctgagataggtgcctcactgattaagcattggtaactgtcagaccaagtttactcatatatactttagattgatttaaaacttcatttttaatttaaaaggatctaggtgaagatcctttttgataatctcatgaccaaaatcccttaacgtgagttttcgttccactgagcgtcagaccccgtagaaaagatcaaaggatcttcttgagatcctttttttctgcgcgtaatctgctgcttgcaaacaaaaaaaccaccgctaccagcggtggtttgtttgccggatcaagagctaccaactctttttccgaaggtaactggcttcagcagagcgcagataccaaatactgttcttctagtgtagccgtagttaggccaccacttcaagaactctgtagcaccgcctacatacctcgctctgctaatcctgttaccagtggctgctgccagtggcgataagtcgtgtcttaccgggttggactcaagacgatagttaccggataaggcgcagcggtcgggctgaacggggggttcgtgcacacagcccagcttggagcgaacgacctacaccgaactgagatacctacagcgtgagctatgagaaagcgccacgcttcccgaagggagaaaggcggacaggtatccggtaagcggcagggtcggaacaggagagcgcacgagggagcttccagggggaaacgcctggtatctttatagtcctgtcgggtttcgccacctctgacttgagcgtcgatttttgtgatgctcgtcaggggggcggagcctatggaaaaacgccagcaacgcggcctttttacggttcctggccttttgctggccttttgctcacatgttctttcctgcgttatcccctgattctgtggataaccgtattaccgcctttgagtgagctgataccgctcgccgcagccgaacgaccgagcgcagcgagtcagtgagcgaggaagcggaagagcgcccaatacgcaaaccgcctctccccgcgcgttggccgattcattaatgcagctggcacgacaggtttcccgactggaaagcgggcagtgagcgcaacgcaattaatgtgagttagctcactcattaggcaccccaggctttacactttatgcttccggctcgtatgttgtgtggaattgtgagcggataacaatttcacacaggaaacagctatgaccatgattacgccaagcgcgcaattaaccctcactaaagggaacaaaagctggagctgcaagcttaatgtagtcttatgcaatactcttgtagtcttgcaacatggtaacgatgagttagcaacatgccttacaaggagagaaaaagcaccgtgcatgccgattggtggaagtaaggtggtacgatcgtgccttattaggaaggcaacagacgggtctgacatggattggacgaaccactgaattgccgcattgcagagatattgtatttaagtgcctagctcgatacataaacgggtctctctggttagaccagatctgagcctgggagctctctggctaactagggaacccactgcttaagcctcaataaagcttgccttgagtgcttcaagtagtgtgtgcccgtctgttgtgtgactctggtaactagagatccctcagacccttttagtcagtgtggaaaatctctagcagtggcgcccgaacagggacttgaaagcgaaagggaaaccagaggagctctctcgacgcaggactcggcttgctgaagcgcgcacggcaagaggcgaggggcggcgactggtgagtacgccaaaaattttgactagcggaggctagaaggagagagatgggtgcgagagcgtcagtattaagcgggggagaattagatcgcgatgggaaaaaattcggttaaggccagggggaaagaaaaaatataaattaaaacatatagtatgggcaagcagggagctagaacgattcgcagttaatcctggcctgttagaaacatcagaaggctgtagacaaatactgggacagctacaaccatcccttcagacaggatcagaagaacttagatcattatataatacagtagcaaccctctattgtgtgcatcaaaggatagagataaaagacaccaaggaagctttagacaagatagaggaagagcaaaacaaaagtaagaccaccgcacagcaagcggccgctgatcttcagacctggaggaggagatatgagggacaattggagaagtgaattatataaatataaagtagtaaaaattgaaccattaggagtagcacccaccaaggcaaagagaagagtggtgcagagagaaaaaagagcagtgggaataggagctttgttccttgggttcttgggagcagcaggaagcactatgggcgcagcgtcaatgacgctgacggtacaggccagacaattattgtctggtatagtgcagcagcagaacaatttgctgagggctattgaggcgcaacagcatctgttgcaactcacagtctggggcatcaagcagctccaggcaagaatcctggctgtggaaagatacctaaaggatcaacagctcctggggatttggggttgctctggaaaactcatttgcaccactgctgtgccttggaatgctagttggagtaataaatctctggaacagatttggaatcacacgacctggatggagtgggacagagaaattaacaattacacaagcttaatacactccttaattgaagaatcgcaaaaccagcaagaaaagaatgaacaagaattattggaattagataaatgggcaagtttgtggaattggtttaacataacaaattggctgtggtatataaaattattcataatgatagtaggaggcttggtaggtttaagaatagtttttgctgtactttctatagtgaatagagttaggcagggatattcaccattatcgtttcagacccacctcccaaccccgaggggacccttgcgccttttccaaggcagccctgggtttgcgcagggacgcggctgctctgggcgtggttccgggaaacgcagcggcgccgaccctgggtctcgcacattcttcacgtccgttcgcagcgtcacccggatcttcgccgctacccttgtgggccccccggcgacgcttcctgctccgcccctaagtcgggaaggttccttgcggttcgcggcgtgccggacgtgacaaacggaagccgcacgtctcactagtaccctcgcagacggacagcgccagggagcaatggcagcgcgccgaccgcgatgggctgtggccaatagcggctgctcagcagggcgcgccgagagcagcggccgggaaggggcggtgcgggaggcggggtgtggggcggtagtgtgggccctgttcctgcccgcgcggtgttccgcattctgcaagcctccggagcgcacgtcggcagtcggctccctcgttgaccgaatcaccgacctctctccccagggggtacccagctgtctagagaattctagatcttgagacaaatggcagtattcatccacaattttaaaagaaaaggggggattggggggtacagtgcaggggaaagaatagtagacataatagcaacagacatacaaactaaagaattacaaaaacaaattacaaaaattcaaaattttcgggtttattacagggacagcagagatccactttggcgccggctcgaggggg

SEQ ID NO: 209 - protein, 228 aa, Artificial Sequence
  Synthetic Polypeptide
MKKPELTATSVEKFLIEKFDSVSDLMQLSEGEESRAFSFDVGGRGYVLRVNSCADGFYKDRYVYRHFASAALPIPEVLDIGEFSESLTYCLSYETEILTVEYGLLPIGKIVEKRIECTVYSVDNNGNIYTQPVAQWHDRGEQEVFEYCLEDGSLIRATKDHKFMTVDGQMLPIDEIFERELDLMRVDNLPNGGGGSGSAQLEKELQALEKKLAQLEWENQALEKELAQ

SEQ ID NO: 210 - DNA, 9534 bp, Artificial Sequence
  Synthetic Polynucleotide
cccggggttattaatagtaatcaattacggggtcattagttcatagcccatatatggagttccgcgttacataacttacggtaaatggcccgcctggctgaccgcccaacgacccccgcccattgacgtcaataatgacgtatgttcccatagtaacgccaatagggactttccattgacgtcaatgggtggagtatttacggtaaactgcccacttggcagtacatcaagtgtatcatatgccaagtacgccccctattgacgtcaatgacggtaaatggcccgcctggcattatgcccagtacatgaccttatgggactttcctacttggcagtacatctacgtattagtcatcgctattaccatggtgatgcggttttggcagtacatcaatgggcgtggatagcggtttgactcacggggatttccaagtctccaccccattgacgtcaatgggagtttgttttggcaccaaaatcaacgggactttccaaaatgtcgtaacaactccgccccattgacgcaaatgggcggtaggcgtgtacggtgggaggtctatataagcagagctctctggctaactgtcgggatcaacaagtttgtacaaaaaagcaggctccgaattcaccggtgccgccaccatggctcaactgaagaagaaactccaggccaataagaaagaactggcacagctgaagtggaagctgcaggcactgaaaaagaagctggcacagggcggaggaggctcaggcagtatgattaagatcgctacgcggaagtacctggggaaacagaacgtctacgacataggtgtgggcgagccccacaactttgctctgaaaaatggatttatcgccagcaactgcatctcccgccgtgcacagggtgtcacgttgcaagacctgcctgaaaccgaactgcccgctgttctgcagccggtcgcggaggccatggatgcgatcgctgcggccgatcttagccagacgagcgggttcggcccattcggaccgcaaggaatcggtcaatacactacatggcgtgatttcatatgcgcgattgctgatccccatgtgtatcactggcaaactgtgatggacgacaccgtcagtgcgtccgtcgcgcaggctctcgatgagctgatgctttgggccgaggactgccccgaagtccggcacctcgtgcacgcggatttcggctgtatcagtggcgactccctgatctcactcgcaagcactggaaagcgagttagcatcaaggacttgctggacgaaaaggatttcgaaatttgggcaatcaatgagcagaccatgaaactggagtctgcaaaggtgtcccgggtgttttgcacgggtaagaagcttgtttatatccttaaaactagactgggccggacgatcaaagccaccgcgaaccacagattcttgacaatcgacgggtggaaacggctggacgaactgagcttgaaggagcacatcgcccttcctcggaagctcgagtcatcttccctgcagctgtgattaattaagaattcgacccagctttcttgtacaaagtggttggtaagcctatccctaaccctctcctcggtctcgattctacgtagtaatgagctagcagtctcgaggttaacgaattccgccccccccctaacgttactggccgaagccgcttggaataaggccggtgtgcgcttgtctatatgttattttccaccatattgccgtcttttggcaatgtgagggcccggaaacctggccctgtcttcttgacgagcattcctaggggtctttcccctctcgccaaaggaatgcaaggtctgttgaatgtcgtgaaggaagcagttcctctggaagcttcttgaagacaaacaacgtctgtagcgaccctttgcaggcagcggaaccccccacctggcgacaggtgcccctgcggccaaaagccacgtgtataagatacacctgcaaaggcggcacaaccccagtgccacgttgtgagttggatagttgtggaaagagtcaaatggctctcctcaagcgtattcaacaaggggctgaaggatgcccagaaggtaccccattgtatgggatctgatctggggcctcggtgcacatgctttacatgtgtttagtcgaggttaaaaaaacgtctaggccccccgaaccacggggacgtggttttcctttgaaaaacacgataataccatggtgagcaagggcgaggagctgttcaccggggtggtgcccatcctggtcgagctggacggcgacgtaaacggccacaagttcagcgtgtccggcgagggcgagggcgatgccacctacggcaagctgaccctgaagttcatctgcaccaccggcaagctgcccgtgccctggcccaccctcgtgaccaccctgacctacggcgtgcagtgcttcagccgctaccccgaccacatgaagcagcacgacttcttcaagtccgccatgcccgaaggctacgtccaggagcgcaccatcttcttcaaggacgacggcaactacaagacccgcgccgaggtgaagttcgagggcgacaccctggtgaaccgcatcgagctgaagggcatcgacttcaaggaggacggcaacatcctggggcacaagctggagtacaactacaacagccacaacgtctatatcatggccgacaagcagaagaacggcatcaaggtgaacttcaagatccgccacaacatcgaggacggcagcgtgcagctcgccgaccactaccagcagaacacccccatcggcgacggccccgtgctgctgcccgacaaccactacctgagcacccagtccgccctgagcaaagaccccaacgagaagcgcgatcacatggtcctgctggagttcgtgaccgccgccgggatcactctcggcatggacgagctgtacaagtaacaccggtggcgcgttaagtcgacaatcaacctctggattacaaaatttgtgaaagattgactggtattcttaactatgttgctccttttacgctatgtggatacgctgctttaatgcctttgtatcatgctattgcttcccgtatggctttcattttctcctccttgtataaatcctggttgctgtctctttatgaggagttgtggcccgttgtcaggcaacgtggcgtggtgtgcactgtgtttgctgacgcaacccccactggttggggcattgccaccacctgtcagctcctttccgggactttcgctttccccctccctattgccacggcggaactcatcgccgcctgccttgcccgctgctggacaggggctcggctgttgggcactgacaattccgtggtgttgtcggggaaatcatcgtcctttccttggctgctcgcctgtgttgccacctggattctgcgcgggacgtccttctgctacgtcccttcggccctcaatccagcggaccttccttcccgcggcctgctgccggctctgcggcctcttccgcgtcttcgccttcgccctcagacgagtcggatctccctttgggccgcctccccgcgtcgactttaagaccaatgacttacaaggcagctgtagatcttagccactttttaaaagaaaaggggggactggaagggctaattcactcccaacgaagacaagatctgctttttgcttgtactgggtctctctggttagaccagatctgagcctgggagctctctggctaactagggaacccactgcttaagcctcaataaagcttgccttgagtgcttcaagtagtgtgtgcccgtctgttgtgtgactctggtaactagagatccctcagacccttttagtcagtgtggaaaatctctagcagtacgtatagtagttcatgtcatcttattattcagtatttataacttgcaaagaaatgaatatcagagagtgagaggaacttgtttattgcagcttataatggttacaaataaagcaatagcatcacaaatttcacaaataaagcatttttttcactgcattctagttgtggtttgtccaaactcatcaatgtatcttatcatgtctggctctagctatcccgcccctaactccgcccatcccgcccctaactccgcccagttccgcccattctccgccccatggctgactaattttttttatttatgcagaggccgaggccgcctcggcctctgagctattccagaagtagtgaggaggcttttttggaggcctagggacgtacccaattcgccctatagtgagtcgtattacgcgcgctcactggccgtcgttttacaacgtcgtgactgggaaaaccctggcgttacccaacttaatcgccttgcagcacatccccctttcgccagctggcgtaatagcgaagaggcccgcaccgatcgcccttcccaacagttgcgcagcctgaatggcgaatgggacgcgccctgtagcggcgcattaagcgcggcgggtgtggtggttacgcgcagcgtgaccgctacacttgccagcgccctagcgcccgctcctttcgctttcttcccttcctttctcgccacgttcgccggctttccccgtcaagctctaaatcgggggctccctttagggttccgatttagtgctttacggcacctcgaccccaaaaaacttgattagggtgatggttcacgtagtgggccatcgccctgatagacggtttttcgccctttgacgttggagtccacgttctttaatagtggactcttgttccaaactggaacaacactcaaccctatctcggtctattcttttgatttataagggattttgccgatttcggcctattggttaaaaaatgagctgatttaacaaaaatttaacgcgaattttaacaaaatattaacgcttacaatttaggtggcacttttcggggaaatgtgcgcggaacccctatttgtttatttttctaaatacattcaaatatgtatccgctcatgagacaataaccctgataaatgcttcaataatattgaaaaaggaagagtatgagtattcaacatttccgtgtcgcccttattcccttttttgcggcattttgccttcctgtttttgctcacccagaaacgctggtgaaagtaaaagatgctgaagatcagttgggtgcacgagtgggttacatcgaactggatctcaacagcggtaagatccttgagagttttcgccccgaagaacgttttccaatgatgagcacttttaaagttctgctatgtggcgcggtattatcccgtattgacgccgggcaagagcaactcggtcgccgcatacactattctcagaatgacttggttgagtactcaccagtcacagaaaagcatcttacggatggcatgacagtaagagaattatgcagtgctgccataaccatgagtgataacactgcggccaacttacttctgacaacgatcggaggaccgaaggagctaaccgcttttttgcacaacatgggggatcatgtaactcgccttgatcgttgggaaccggagctgaatgaagccataccaaacgacgagcgtgacaccacgatgcctgtagcaatggcaacaacgttgcgcaaactattaactggcgaactacttactctagcttcccggcaacaattaatagactggatggaggcggataaagttgcaggaccacttctgcgctcggcccttccggctggctggtttattgctgataaatctggagccggtgagcgtgggtctcgcggtatcattgcagcactggggccagatggtaagccctcccgtatcgtagttatctacacgacggggagtcaggcaactatggatgaacgaaatagacagatcgctgagataggtgcctcactgattaagcattggtaactgtcagaccaagtttactcatatatactttagattgatttaaaacttcatttttaatttaaaaggatctaggtgaagatcctttttgataatctcatgaccaaaatcccttaacgtgagttttcgttccactgagcgtcagaccccgtagaaaagatcaaaggatcttcttgagatcctttttttctgcgcgtaatctgctgcttgcaaacaaaaaaaccaccgctaccagcggtggtttgtttgccggatcaagagctaccaactctttttccgaaggtaactggcttcagcagagcgcagataccaaatactgttcttctagtgtagccgtagttaggccaccacttcaagaactctgtagcaccgcctacatacctcgctctgctaatcctgttaccagtggctgctgccagtggcgataagtcgtgtcttaccgggttggactcaagacgatagttaccggataaggcgcagcggtcgggctgaacggggggttcgtgcacacagcccagcttggagcgaacgacctacaccgaactgagatacctacagcgtgagctatgagaaagcgccacgcttcccgaagggagaaaggcggacaggtatccggtaagcggcagggtcggaacaggagagcgcacgagggagcttccagggggaaacgcctggtatctttatagtcctgtcgggtttcgccacctctgacttgagcgtcgatttttgtgatgctcgtcaggggggcggagcctatggaaaaacgccagcaacgcggcctttttacggttcctggccttttgctggccttttgctcacatgttctttcctgcgttatcccctgattctgtggataaccgtattaccgcctttgagtgagctgataccgctcgccgcagccgaacgaccgagcgcagcgagtcagtgagcgaggaagcggaagagcgcccaatacgcaaaccgcctctccccgcgcgttggccgattcattaatgcagctggcacgacaggtttcccgactggaaagcgggcagtgagcgcaacgcaattaatgtgagttagctcactcattaggcaccccaggctttacactttatgcttccggctcgtatgttgtgtggaattgtgagcggataacaatttcacacaggaaacagctatgaccatgattacgccaagcgcgcaattaaccctcactaaagggaacaaaagctggagctgcaagcttaatgtagtcttatgcaatactcttgtagtcttgcaacatggtaacgatgagttagcaacatgccttacaaggagagaaaaagcaccgtgcatgccgattggtggaagtaaggtggtacgatcgtgccttattaggaaggcaacagacgggtctgacatggattggacgaaccactgaattgccgcattgcagagatattgtatttaagtgcctagctcgatacataaacgggtctctctggttagaccagatctgagcctgggagctctctggctaactagggaacccactgcttaagcctcaataaagcttgccttgagtgcttcaagtagtgtgtgcccgtctgttgtgtgactctggtaactagagatccctcagacccttttagtcagtgtggaaaatctctagcagtggcgcccgaacagggacttgaaagcgaaagggaaaccagaggagctctctcgacgcaggactcggcttgctgaagcgcgcacggcaagaggcgaggggcggcgactggtgagtacgccaaaaattttgactagcggaggctagaaggagagagatgggtgcgagagcgtcagtattaagcgggggagaattagatcgcgatgggaaaaaattcggttaaggccagggggaaagaaaaaatataaattaaaacatatagtatgggcaagcagggagctagaacgattcgcagttaatcctggcctgttagaaacatcagaaggctgtagacaaatactgggacagctacaaccatcccttcagacaggatcagaagaacttagatcattatataatacagtagcaaccctctattgtgtgcatcaaaggatagagataaaagacaccaaggaagctttagacaagatagaggaagagcaaaacaaaagtaagaccaccgcacagcaagcggccgctgatcttcagacctggaggaggagatatgagggacaattggagaagtgaattatataaatataaagtagtaaaaattgaaccattaggagtagcacccaccaaggcaaagagaagagtggtgcagagagaaaaaagagcagtgggaataggagctttgttccttgggttcttgggagcagcaggaagcactatgggcgcagcgtcaatgacgctgacggtacaggccagacaattattgtctggtatagtgcagcagcagaacaatttgctgagggctattgaggcgcaacagcatctgttgcaactcacagtctggggcatcaagcagctccaggcaagaatcctggctgtggaaagatacctaaaggatcaacagctcctggggatttggggttgctctggaaaactcatttgcaccactgctgtgccttggaatgctagttggagtaataaatctctggaacagatttggaatcacacgacctggatggagtgggacagagaaattaacaattacacaagcttaatacactccttaattgaagaatcgcaaaaccagcaagaaaagaatgaacaagaattattggaattagataaatgggcaagtttgtggaattggtttaacataacaaattggctgtggtatataaaattattcataatgatagtaggaggcttggtaggtttaagaatagtttttgctgtactttctatagtgaatagagttaggcagggatattcaccattatcgtttcagacccacctcccaaccccgaggggacccttgcgccttttccaaggcagccctgggtttgcgcagggacgcggctgctctgggcgtggttccgggaaacgcagcggcgccgaccctgggtctcgcacattcttcacgtccgttcgcagcgtcacccggatcttcgccgctacccttgtgggccccccggcgacgcttcctgctccgcccctaagtcgggaaggttccttgcggttcgcggcgtgccggacgtgacaaacggaagccgcacgtctcactagtaccctcgcagacggacagcgccagggagcaatggcagcgcgccgaccgcgatgggctgtggccaatagcggctgctcagcagggcgcgccgagagcagcggccgggaaggggcggtgcgggaggcggggtgtggggcggtagtgtgggccctgttcctgcccgcgcggtgttccgcattctgcaagcctccggagcgcacgtcggcagtcggctccctcgttgaccgaatcaccgacctctctccccagggggtacccagctgtctagagaattctagatcttgagacaaatggcagtattcatccacaattttaaaagaaaaggggggattggggggtacagtgcaggggaaagaatagtagacataatagcaacagacatacaaactaaagaattacaaaaacaaattacaaaaattcaaaattttcgggtttattacagggacagcagagatccactttggcgccggctcgaggggg

SEQ ID NO: 211 - protein, 291 aa, Artificial Sequence
  Synthetic Polypeptide
MAQLKKKLQANKKELAQLKWKLQALKKKLAQGGGGSGSMIKIATRKYLGKQNVYDIGVGEPHNFALKNGFIASNCISRRAQGVTLQDLPETELPAVLQPVAEAMDAIAAADLSQTSGFGPFGPQGIGQYTTWRDFICAIADPHVYHWQTVMDDTVSASVAQALDELMLWAEDCPEVRHLVHADFGCISGDSLISLASTGKRVSIKDLLDEKDFEIWAINEQTMKLESAKVSRVFCTGKKLVYILKTRLGRTIKATANHRFLTIDGWKRLDELSLKEHIALPRKLESSSLQL

SEQ ID NO: 212 - DNA, 9345 bp, Artificial Sequence
  Synthetic Polynucleotide
cccggggttattaatagtaatcaattacggggtcattagttcatagcccatatatggagttccgcgttacataacttacggtaaatggcccgcctggctgaccgcccaacgacccccgcccattgacgtcaataatgacgtatgttcccatagtaacgccaatagggactttccattgacgtcaatgggtggagtatttacggtaaactgcccacttggcagtacatcaagtgtatcatatgccaagtacgccccctattgacgtcaatgacggtaaatggcccgcctggcattatgcccagtacatgaccttatgggactttcctacttggcagtacatctacgtattagtcatcgctattaccatggtgatgcggttttggcagtacatcaatgggcgtggatagcggtttgactcacggggatttccaagtctccaccccattgacgtcaatgggagtttgttttggcaccaaaatcaacgggactttccaaaatgtcgtaacaactccgccccattgacgcaaatgggcggtaggcgtgtacggtgggaggtctatataagcagagctctctggctaactgtcgggatcaacaagtttgtacaaaaaagcaggctccgaattcaccggtgccgccaccatgagtcccgaaatcgaaaagctctctcagagcgatatatattgggactccatcgtaagcataacagagacgggggtcgaggaggtgttcgatctgacagttcctgggcctcataatttcgtagcgaacgacatcattgtacataactccaacaatgtcctgacggacaatggccgcataacagcggtcattgactggagcgaggcgatgttcggggattcccaatacgaggtcgccaacatcttcttctggaggccgtggttggcttgcctttcatacgagaccgagatcctgactgtcgagtacggattgcttcctatcggcaaaatcgtggagaagaggattgaatgtaccgtctattcagtcgataataatgggaacatctacacacagcccgtggctcaatggcacgacagaggagagcaggaagtttttgaatactgtctcgaggacggatccctcatccgcgctactaaagatcataagtttatgaccgtggacggccagatgctgccaattgacgaaatttttgaacgagagctggatctgatgagagtcgacaaccttccaaacggtggaggggggtcaggctctgcgcagctggaaaaggagcttcaagccctcgaaaaaaagttggcccagctcgagtgggagaaccaggctctggagaaagaactggcccagtgattaattaagaattcgacccagctttcttgtacaaagtggttggtaagcctatccctaaccctctcctcggtctcgattctacgtagtaatgagctagcagtctcgaggttaacgaattccgccccccccctaacgttactggccgaagccgcttggaataaggccggtgtgcgcttgtctatatgttattttccaccatattgccgtcttttggcaatgtgagggcccggaaacctggccctgtcttcttgacgagcattcctaggggtctttcccctctcgccaaaggaatgcaaggtctgttgaatgtcgtgaaggaagcagttcctctggaagcttcttgaagacaaacaacgtctgtagcgaccctttgcaggcagcggaaccccccacctggcgacaggtgcccctgcggccaaaagccacgtgtataagatacacctgcaaaggcggcacaaccccagtgccacgttgtgagttggatagttgtggaaagagtcaaatggctctcctcaagcgtattcaacaaggggctgaaggatgcccagaaggtaccccattgtatgggatctgatctggggcctcggtgcacatgctttacatgtgtttagtcgaggttaaaaaaacgtctaggccccccgaaccacggggacgtggttttcctttgaaaaacacgataataccatggtgagcaagggcgaggagctgttcaccggggtggtgcccatcctggtcgagctggacggcgacgtaaacggccacaagttcagcgtgtccggcgagggcgagggcgatgccacctacggcaagctgaccctgaagttcatctgcaccaccggcaagctgcccgtgccctggcccaccctcgtgaccaccctgacctacggcgtgcagtgcttcagccgctaccccgaccacatgaagcagcacgacttcttcaagtccgccatgcccgaaggctacgtccaggagcgcaccatcttcttcaaggacgacggcaactacaagacccgcgccgaggtgaagttcgagggcgacaccctggtgaaccgcatcgagctgaagggcatcgacttcaaggaggacggcaacatcctggggcacaagctggagtacaactacaacagccacaacgtctatatcatggccgacaagcagaagaacggcatcaaggtgaacttcaagatccgccacaacatcgaggacggcagcgtgcagctcgccgaccactaccagcagaacacccccatcggcgacggccccgtgctgctgcccgacaaccactacctgagcacccagtccgccctgagcaaagaccccaacgagaagcgcgatcacatggtcctgctggagttcgtgaccgccgccgggatcactctcggcatggacgagctgtacaagtaacaccggtggcgcgttaagtcgacaatcaacctctggattacaaaatttgtgaaagattgactggtattcttaactatgttgctccttttacgctatgtggatacgctgctttaatgcctttgtatcatgctattgcttcccgtatggctttcattttctcctccttgtataaatcctggttgctgtctctttatgaggagttgtggcccgttgtcaggcaacgtggcgtggtgtgcactgtgtttgctgacgcaacccccactggttggggcattgccaccacctgtcagctcctttccgggactttcgctttccccctccctattgccacggcggaactcatcgccgcctgccttgcccgctgctggacaggggctcggctgttgggcactgacaattccgtggtgttgtcggggaaatcatcgtcctttccttggctgctcgcctgtgttgccacctggattctgcgcgggacgtccttctgctacgtcccttcggccctcaatccagcggaccttccttcccgcggcctgctgccggctctgcggcctcttccgcgtcttcgccttcgccctcagacgagtcggatctccctttgggccgcctccccgcgtcgactttaagaccaatgacttacaaggcagctgtagatcttagccactttttaaaagaaaaggggggactggaagggctaattcactcccaacgaagacaagatctgctttttgcttgtactgggtctctctggttagaccagatctgagcctgggagctctctggctaactagggaacccactgcttaagcctcaataaagcttgccttgagtgcttcaagtagtgtgtgcccgtctgttgtgtgactctggtaactagagatccctcagacccttttagtcagtgtggaaaatctctagcagtacgtatagtagttcatgtcatcttattattcagtatttataacttgcaaagaaatgaatatcagagagtgagaggaacttgtttattgcagcttataatggttacaaataaagcaatagcatcacaaatttcacaaataaagcatttttttcactgcattctagttgtggtttgtccaaactcatcaatgtatcttatcatgtctggctctagctatcccgcccctaactccgcccatcccgcccctaactccgcccagttccgcccattctccgccccatggctgactaattttttttatttatgcagaggccgaggccgcctcggcctctgagctattccagaagtagtgaggaggcttttttggaggcctagggacgtacccaattcgccctatagtgagtcgtattacgcgcgctcactggccgtcgttttacaacgtcgtgactgggaaaaccctggcgttacccaacttaatcgccttgcagcacatccccctttcgccagctggcgtaatagcgaagaggcccgcaccgatcgcccttcccaacagttgcgcagcctgaatggcgaatgggacgcgccctgtagcggcgcattaagcgcggcgggtgtggtggttacgcgcagcgtgaccgctacacttgccagcgccctagcgcccgctcctttcgctttcttcccttcctttctcgccacgttcgccggctttccccgtcaagctctaaatcgggggctccctttagggttccgatttagtgctttacggcacctcgaccccaaaaaacttgattagggtgatggttcacgtagtgggccatcgccctgatagacggtttttcgccctttgacgttggagtccacgttctttaatagtggactcttgttccaaactggaacaacactcaaccctatctcggtctattcttttgatttataagggattttgccgatttcggcctattggttaaaaaatgagctgatttaacaaaaatttaacgcgaattttaacaaaatattaacgcttacaatttaggtggcacttttcggggaaatgtgcgcggaacccctatttgtttatttttctaaatacattcaaatatgtatccgctcatgagacaataaccctgataaatgcttcaataatattgaaaaaggaagagtatgagtattcaacatttccgtgtcgcccttattcccttttttgcggcattttgccttcctgtttttgctcacccagaaacgctggtgaaagtaaaagatgctgaagatcagttgggtgcacgagtgggttacatcgaactggatctcaacagcggtaagatccttgagagttttcgccccgaagaacgttttccaatgatgagcacttttaaagttctgctatgtggcgcggtattatcccgtattgacgccgggcaagagcaactcggtcgccgcatacactattctcagaatgacttggttgagtactcaccagtcacagaaaagcatcttacggatggcatgacagtaagagaattatgcagtgctgccataaccatgagtgataacactgcggccaacttacttctgacaacgatcggaggaccgaaggagctaaccgcttttttgcacaacatgggggatcatgtaactcgccttgatcgttgggaaccggagctgaatgaagccataccaaacgacgagcgtgacaccacgatgcctgtagcaatggcaacaacgttgcgcaaactattaactggcgaactacttactctagcttcccggcaacaattaatagactggatggaggcggataaagttgcaggaccacttctgcgctcggcccttccggctggctggtttattgctgataaatctggagccggtgagcgtgggtctcgcggtatcattgcagcactggggccagatggtaagccctcccgtatcgtagttatctacacgacggggagtcaggcaactatggatgaacgaaatagacagatcgctgagataggtgcctcactgattaagcattggtaactgtcagaccaagtttactcatatatactttagattgatttaaaacttcatttttaatttaaaaggatctaggtgaagatcctttttgataatctcatgaccaaaatcccttaacgtgagttttcgttccactgagcgtcagaccccgtagaaaagatcaaaggatcttcttgagatcctttttttctgcgcgtaatctgctgcttgcaaacaaaaaaaccaccgctaccagcggtggtttgtttgccggatcaagagctaccaactctttttccgaaggtaactggcttcagcagagcgcagataccaaatactgttcttctagtgtagccgtagttaggccaccacttcaagaactctgtagcaccgcctacatacctcgctctgctaatcctgttaccagtggctgctgccagtggcgataagtcgtgtcttaccgggttggactcaagacgatagttaccggataaggcgcagcggtcgggctgaacggggggttcgtgcacacagcccagcttggagcgaacgacctacaccgaactgagatacctacagcgtgagctatgagaaagcgccacgcttcccgaagggagaaaggcggacaggtatccggtaagcggcagggtcggaacaggagagcgcacgagggagcttccagggggaaacgcctggtatctttatagtcctgtcgggtttcgccacctctgacttgagcgtcgatttttgtgatgctcgtcaggggggcggagcctatggaaaaacgccagcaacgcggcctttttacggttcctggccttttgctggccttttgctcacatgttctttcctgcgttatcccctgattctgtggataaccgtattaccgcctttgagtgagctgataccgctcgccgcagccgaacgaccgagcgcagcgagtcagtgagcgaggaagcggaagagcgcccaatacgcaaaccgcctctccccgcgcgttggccgattcattaatgcagctggcacgacaggtttcccgactggaaagcgggcagtgagcgcaacgcaattaatgtgagttagctcactcattaggcaccccaggctttacactttatgcttccggctcgtatgttgtgtggaattgtgagcggataacaatttcacacaggaaacagctatgaccatgattacgccaagcgcgcaattaaccctcactaaagggaacaaaagctggagctgcaagcttaatgtagtcttatgcaatactcttgtagtcttgcaacatggtaacgatgagttagcaacatgccttacaaggagagaaaaagcaccgtgcatgccgattggtggaagtaaggtggtacgatcgtgccttattaggaaggcaacagacgggtctgacatggattggacgaaccactgaattgccgcattgcagagatattgtatttaagtgcctagctcgatacataaacgggtctctctggttagaccagatctgagcctgggagctctctggctaactagggaacccactgcttaagcctcaataaagcttgccttgagtgcttcaagtagtgtgtgcccgtctgttgtgtgactctggtaactagagatccctcagacccttttagtcagtgtggaaaatctctagcagtggcgcccgaacagggacttgaaagcgaaagggaaaccagaggagctctctcgacgcaggactcggcttgctgaagcgcgcacggcaagaggcgaggggcggcgactggtgagtacgccaaaaattttgactagcggaggctagaaggagagagatgggtgcgagagcgtcagtattaagcgggggagaattagatcgcgatgggaaaaaattcggttaaggccagggggaaagaaaaaatataaattaaaacatatagtatgggcaagcagggagctagaacgattcgcagttaatcctggcctgttagaaacatcagaaggctgtagacaaatactgggacagctacaaccatcccttcagacaggatcagaagaacttagatcattatataatacagtagcaaccctctattgtgtgcatcaaaggatagagataaaagacaccaaggaagctttagacaagatagaggaagagcaaaacaaaagtaagaccaccgcacagcaagcggccgctgatcttcagacctggaggaggagatatgagggacaattggagaagtgaattatataaatataaagtagtaaaaattgaaccattaggagtagcacccaccaaggcaaagagaagagtggtgcagagagaaaaaagagcagtgggaataggagctttgttccttgggttcttgggagcagcaggaagcactatgggcgcagcgtcaatgacgctgacggtacaggccagacaattattgtctggtatagtgcagcagcagaacaatttgctgagggctattgaggcgcaacagcatctgttgcaactcacagtctggggcatcaagcagctccaggcaagaatcctggctgtggaaagatacctaaaggatcaacagctcctggggatttggggttgctctggaaaactcatttgcaccactgctgtgccttggaatgctagttggagtaataaatctctggaacagatttggaatcacacgacctggatggagtgggacagagaaattaacaattacacaagcttaatacactccttaattgaagaatcgcaaaaccagcaagaaaagaatgaacaagaattattggaattagataaatgggcaagtttgtggaattggtttaacataacaaattggctgtggtatataaaattattcataatgatagtaggaggcttggtaggtttaagaatagtttttgctgtactttctatagtgaatagagttaggcagggatattcaccattatcgtttcagacccacctcccaaccccgaggggacccttgcgccttttccaaggcagccctgggtttgcgcagggacgcggctgctctgggcgtggttccgggaaacgcagcggcgccgaccctgggtctcgcacattcttcacgtccgttcgcagcgtcacccggatcttcgccgctacccttgtgggccccccggcgacgcttcctgctccgcccctaagtcgggaaggttccttgcggttcgcggcgtgccggacgtgacaaacggaagccgcacgtctcactagtaccctcgcagacggacagcgccagggagcaatggcagcgcgccgaccgcgatgggctgtggccaatagcggctgctcagcagggcgcgccgagagcagcggccgggaaggggcggtgcgggaggcggggtgtggggcggtagtgtgggccctgttcctgcccgcgcggtgttccgcattctgcaagcctccggagcgcacgtcggcagtcggctccctcgttgaccgaatcaccgacctctctccccagggggtacccagctgtctagagaattctagatcttgagacaaatggcagtattcatccacaattttaaaagaaaaggggggattggggggtacagtgcaggggaaagaatagtagacataatagcaacagacatacaaactaaagaattacaaaaacaaattacaaaaattcaaaattttcgggtttattacagggacagcagagatccactttggcgccggctcgaggggg

SEQ ID NO: 213 - protein, 228 aa, Artificial Sequence
  Synthetic Polypeptide
MSPEIEKLSQSDIYWDSIVSITETGVEEVFDLTVPGPHNFVANDIIVHNSNNVLTDNGRITAVIDWSEAMFGDSQYEVANIFFWRPWLACLSYETEILTVEYGLLPIGKIVEKRIECTVYSVDNNGNIYTQPVAQWHDRGEQEVFEYCLEDGSLIRATKDHKFMTVDGQMLPIDEIFERELDLMRVDNLPNGGGGSGSAQLEKELQALEKKLAQLEWENQALEKELAQ

SEQ ID NO: 214 - DNA, 9177 bp, Artificial Sequence
  Synthetic Polynucleotide
cccggggttattaatagtaatcaattacggggtcattagttcatagcccatatatggagttccgcgttacataacttacggtaaatggcccgcctggctgaccgcccaacgacccccgcccattgacgtcaataatgacgtatgttcccatagtaacgccaatagggactttccattgacgtcaatgggtggagtatttacggtaaactgcccacttggcagtacatcaagtgtatcatatgccaagtacgccccctattgacgtcaatgacggtaaatggcccgcctggcattatgcccagtacatgaccttatgggactttcctacttggcagtacatctacgtattagtcatcgctattaccatggtgatgcggttttggcagtacatcaatgggcgtggatagcggtttgactcacggggatttccaagtctccaccccattgacgtcaatgggagtttgttttggcaccaaaatcaacgggactttccaaaatgtcgtaacaactccgccccattgacgcaaatgggcggtaggcgtgtacggtgggaggtctatataagcagagctctctggctaactgtcgggatcaacaagtttgtacaaaaaagcaggctccgaattcaccggtgccgccaccatggctcaactgaagaagaaactccaggccaataagaaagaactggcacagctgaagtggaagctgcaggcactgaaaaagaagctggcacagggcggaggaggctcaggcagtatgattaagatcgctacgcggaagtacctggggaaacagaacgtctacgacataggtgtgggcgagccccacaactttgctctgaaaaatggatttatcgccagcaactgtatggagcagcagacgcgctacttcgagcggaggcatccggagcttgcaggatcgccgcggctccgggcgtatatgctccgcattggtcttgaccaactctatcagagcttggttgacggcaatttcgatgatgcagcttgggcgcagggtcgatgcgacgcaatcgtccgatccggagccgggactgtcgggcgtacacaaatcgcccgcagaagcgcggccgtctggaccgatggctgtgtagaagtactcgccgatagtggaaaccgacgccccagcactcgtccgagggcaaaggaatagttaattaagaattcgacccagctttcttgtacaaagtggttggtaagcctatccctaaccctctcctcggtctcgattctacgtagtaatgagctagcagtctcgaggttaacgaattccgccccccccctaacgttactggccgaagccgcttggaataaggccggtgtgcgcttgtctatatgttattttccaccatattgccgtcttttggcaatgtgagggcccggaaacctggccctgtcttcttgacgagcattcctaggggtctttcccctctcgccaaaggaatgcaaggtctgttgaatgtcgtgaaggaagcagttcctctggaagcttcttgaagacaaacaacgtctgtagcgaccctttgcaggcagcggaaccccccacctggcgacaggtgcccctgcggccaaaagccacgtgtataagatacacctgcaaaggcggcacaaccccagtgccacgttgtgagttggatagttgtggaaagagtcaaatggctctcctcaagcgtattcaacaaggggctgaaggatgcccagaaggtaccccattgtatgggatctgatctggggcctcggtgcacatgctttacatgtgtttagtcgaggttaaaaaaacgtctaggccccccgaaccacggggacgtggttttcctttgaaaaacacgataataccatggtgagcaagggcgaggaggataacatggccatcatcaaggagttcatgcgcttcaaggtgcacatggagggctccgtgaacggccacgagttcgagatcgagggcgagggcgagggccgcccctacgagggcacccagaccgccaagctgaaggtgaccaagggtggccccctgcccttcgcctgggacatcctgtcccctcagttcatgtacggctccaaggcctacgtgaagcaccccgccgacatccccgactacttgaagctgtccttccccgagggcttcaagtgggagcgcgtgatgaacttcgaggacggcggcgtggtgaccgtgacccaggactcctccctgcaggacggcgagttcatctacaaggtgaagctgcgcggcaccaacttcccctccgacggccccgtaatgcagaagaagaccatgggctgggaggcctcctccgagcggatgtaccccgaggacggcgccctgaagggcgagatcaagcagaggctgaagctgaaggacggcggccactacgacgctgaggtcaagaccacctacaaggccaagaagcccgtgcagctgcccggcgcctacaacgtcaacatcaagttggacatcacctcccacaacgaggactacaccatcgtggaacagtacgaacgcgccgagggccgccactccaccggcggcatggacgagctgtacaagtaacaccggtggcgcgttaagtcgacaatcaacctctggattacaaaatttgtgaaagattgactggtattcttaactatgttgctccttttacgctatgtggatacgctgctttaatgcctttgtatcatgctattgcttcccgtatggctttcattttctcctccttgtataaatcctggttgctgtctctttatgaggagttgtggcccgttgtcaggcaacgtggcgtggtgtgcactgtgtttgctgacgcaacccccactggttggggcattgccaccacctgtcagctcctttccgggactttcgctttccccctccctattgccacggcggaactcatcgccgcctgccttgcccgctgctggacaggggctcggctgttgggcactgacaattccgtggtgttgtcggggaaatcatcgtcctttccttggctgctcgcctgtgttgccacctggattctgcgcgggacgtccttctgctacgtcccttcggccctcaatccagcggaccttccttcccgcggcctgctgccggctctgcggcctcttccgcgtcttcgccttcgccctcagacgagtcggatctccctttgggccgcctccccgcgtcgactttaagaccaatgacttacaaggcagctgtagatcttagccactttttaaaagaaaaggggggactggaagggctaattcactcccaacgaagacaagatctgctttttgcttgtactgggtctctctggttagaccagatctgagcctgggagctctctggctaactagggaacccactgcttaagcctcaataaagcttgccttgagtgcttcaagtagtgtgtgcccgtctgttgtgtgactctggtaactagagatccctcagacccttttagtcagtgtggaaaatctctagcagtacgtatagtagttcatgtcatcttattattcagtatttataacttgcaaagaaatgaatatcagagagtgagaggaacttgtttattgcagcttataatggttacaaataaagcaatagcatcacaaatttcacaaataaagcatttttttcactgcattctagttgtggtttgtccaaactcatcaatgtatcttatcatgtctggctctagctatcccgcccctaactccgcccatcccgcccctaactccgcccagttccgcccattctccgccccatggctgactaattttttttatttatgcagaggccgaggccgcctcggcctctgagctattccagaagtagtgaggaggcttttttggaggcctagggacgtacccaattcgccctatagtgagtcgtattacgcgcgctcactggccgtcgttttacaacgtcgtgactgggaaaaccctggcgttacccaacttaatcgccttgcagcacatccccctttcgccagctggcgtaatagcgaagaggcccgcaccgatcgcccttcccaacagttgcgcagcctgaatggcgaatgggacgcgccctgtagcggcgcattaagcgcggcgggtgtggtggttacgcgcagcgtgaccgctacacttgccagcgccctagcgcccgctcctttcgctttcttcccttcctttctcgccacgttcgccggctttccccgtcaagctctaaatcgggggctccctttagggttccgatttagtgctttacggcacctcgaccccaaaaaacttgattagggtgatggttcacgtagtgggccatcgccctgatagacggtttttcgccctttgacgttggagtccacgttctttaatagtggactcttgttccaaactggaacaacactcaaccctatctcggtctattcttttgatttataagggattttgccgatttcggcctattggttaaaaaatgagctgatttaacaaaaatttaacgcgaattttaacaaaatattaacgcttacaatttaggtggcacttttcggggaaatgtgcgcggaacccctatttgtttatttttctaaatacattcaaatatgtatccgctcatgagacaataaccctgataaatgcttcaataatattgaaaaaggaagagtatgagtattcaacatttccgtgtcgcccttattcccttttttgcggcattttgccttcctgtttttgctcacccagaaacgctggtgaaagtaaaagatgctgaagatcagttgggtgcacgagtgggttacatcgaactggatctcaacagcggtaagatccttgagagttttcgccccgaagaacgttttccaatgatgagcacttttaaagttctgctatgtggcgcggtattatcccgtattgacgccgggcaagagcaactcggtcgccgcatacactattctcagaatgacttggttgagtactcaccagtcacagaaaagcatcttacggatggcatgacagtaagagaattatgcagtgctgccataaccatgagtgataacactgcggccaacttacttctgacaacgatcggaggaccgaaggagctaaccgcttttttgcacaacatgggggatcatgtaactcgccttgatcgttgggaaccggagctgaatgaagccataccaaacgacgagcgtgacaccacgatgcctgtagcaatggcaacaacgttgcgcaaactattaactggcgaactacttactctagcttcccggcaacaattaatagactggatggaggcggataaagttgcaggaccacttctgcgctcggcccttccggctggctggtttattgctgataaatctggagccggtgagcgtgggtctcgcggtatcattgcagcactggggccagatggtaagccctcccgtatcgtagttatctacacgacggggagtcaggcaactatggatgaacgaaatagacagatcgctgagataggtgcctcactgattaagcattggtaactgtcagaccaagtttactcatatatactttagattgatttaaaacttcatttttaatttaaaaggatctaggtgaagatcctttttgataatctcatgaccaaaatcccttaacgtgagttttcgttccactgagcgtcagaccccgtagaaaagatcaaaggatcttcttgagatcctttttttctgcgcgtaatctgctgcttgcaaacaaaaaaaccaccgctaccagcggtggtttgtttgccggatcaagagctaccaactctttttccgaaggtaactggcttcagcagagcgcagataccaaatactgttcttctagtgtagccgtagttaggccaccacttcaagaactctgtagcaccgcctacatacctcgctctgctaatcctgttaccagtggctgctgccagtggcgataagtcgtgtcttaccgggttggactcaagacgatagttaccggataaggcgcagcggtcgggctgaacggggggttcgtgcacacagcccagcttggagcgaacgacctacaccgaactgagatacctacagcgtgagctatgagaaagcgccacgcttcccgaagggagaaaggcggacaggtatccggtaagcggcagggtcggaacaggagagcgcacgagggagcttccagggggaaacgcctggtatctttatagtcctgtcgggtttcgccacctctgacttgagcgtcgatttttgtgatgctcgtcaggggggcggagcctatggaaaaacgccagcaacgcggcctttttacggttcctggccttttgctggccttttgctcacatgttctttcctgcgttatcccctgattctgtggataaccgtattaccgcctttgagtgagctgataccgctcgccgcagccgaacgaccgagcgcagcgagtcagtgagcgaggaagcggaagagcgcccaatacgcaaaccgcctctccccgcgcgttggccgattcattaatgcagctggcacgacaggtttcccgactggaaagcgggcagtgagcgcaacgcaattaatgtgagttagctcactcattaggcaccccaggctttacactttatgcttccggctcgtatgttgtgtggaattgtgagcggataacaatttcacacaggaaacagctatgaccatgattacgccaagcgcgcaattaaccctcactaaagggaacaaaagctggagctgcaagcttaatgtagtcttatgcaatactcttgtagtcttgcaacatggtaacgatgagttagcaacatgccttacaaggagagaaaaagcaccgtgcatgccgattggtggaagtaaggtggtacgatcgtgccttattaggaaggcaacagacgggtctgacatggattggacgaaccactgaattgccgcattgcagagatattgtatttaagtgcctagctcgatacataaacgggtctctctggttagaccagatctgagcctgggagctctctggctaactagggaacccactgcttaagcctcaataaagcttgccttgagtgcttcaagtagtgtgtgcccgtctgttgtgtgactctggtaactagagatccctcagacccttttagtcagtgtggaaaatctctagcagtggcgcccgaacagggacttgaaagcgaaagggaaaccagaggagctctctcgacgcaggactcggcttgctgaagcgcgcacggcaagaggcgaggggcggcgactggtgagtacgccaaaaattttgactagcggaggctagaaggagagagatgggtgcgagagcgtcagtattaagcgggggagaattagatcgcgatgggaaaaaattcggttaaggccagggggaaagaaaaaatataaattaaaacatatagtatgggcaagcagggagctagaacgattcgcagttaatcctggcctgttagaaacatcagaaggctgtagacaaatactgggacagctacaaccatcccttcagacaggatcagaagaacttagatcattatataatacagtagcaaccctctattgtgtgcatcaaaggatagagataaaagacaccaaggaagctttagacaagatagaggaagagcaaaacaaaagtaagaccaccgcacagcaagcggccgctgatcttcagacctggaggaggagatatgagggacaattggagaagtgaattatataaatataaagtagtaaaaattgaaccattaggagtagcacccaccaaggcaaagagaagagtggtgcagagagaaaaaagagcagtgggaataggagctttgttccttgggttcttgggagcagcaggaagcactatgggcgcagcgtcaatgacgctgacggtacaggccagacaattattgtctggtatagtgcagcagcagaacaatttgctgagggctattgaggcgcaacagcatctgttgcaactcacagtctggggcatcaagcagctccaggcaagaatcctggctgtggaaagatacctaaaggatcaacagctcctggggatttggggttgctctggaaaactcatttgcaccactgctgtgccttggaatgctagttggagtaataaatctctggaacagatttggaatcacacgacctggatggagtgggacagagaaattaacaattacacaagcttaatacactccttaattgaagaatcgcaaaaccagcaagaaaagaatgaacaagaattattggaattagataaatgggcaagtttgtggaattggtttaacataacaaattggctgtggtatataaaattattcataatgatagtaggaggcttggtaggtttaagaatagtttttgctgtactttctatagtgaatagagttaggcagggatattcaccattatcgtttcagacccacctcccaaccccgaggggacccttgcgccttttccaaggcagccctgggtttgcgcagggacgcggctgctctgggcgtggttccgggaaacgcagcggcgccgaccctgggtctcgcacattcttcacgtccgttcgcagcgtcacccggatcttcgccgctacccttgtgggccccccggcgacgcttcctgctccgcccctaagtcgggaaggttccttgcggttcgcggcgtgccggacgtgacaaacggaagccgcacgtctcactagtaccctcgcagacggacagcgccagggagcaatggcagcgcgccgaccgcgatgggctgtggccaatagcggctgctcagcagggcgcgccgagagcagcggccgggaaggggcggtgcgggaggcggggtgtggggcggtagtgtgggccctgttcctgcccgcgcggtgttccgcattctgcaagcctccggagcgcacgtcggcagtcggctccctcgttgaccgaatcaccgacctctctccccagggggtacccagctgtctagagaattctagatcttgagacaaatggcagtattcatccacaattttaaaagaaaaggggggattggggggtacagtgcaggggaaagaatagtagacataatagcaacagacatacaaactaaagaattacaaaaacaaattacaaaaattcaaaattttcgggtttattacagggacagcagagatccactttggcgccggctcgaggggg

SEQ ID NO: 215 - protein, 175 aa, Artificial Sequence
  Synthetic Polypeptide
MAQLKKKLQANKKELAQLKWKLQALKKKLAQGGGGSGSMIKIATRKYLGKQNVYDIGVGEPHNFALKNGFIASNCMEQQTRYFERRHPELAGSPRLRAYMLRIGLDQLYQSLVDGNFDDAAWAQGRCDAIVRSGAGTVGRTQIARRSAAVWTDGCVEVLADSGNRRPSTRPRAKE

SEQ ID NO: 216 - DNA, 926 bp, Artificial Sequence
  Synthetic Polynucleotide
cgcagcaccggtgccgccaccatgattaagatcgctacgcggaagtacctggggaaacagaacgtctacgacataggtgtggagcgcgatcacaactttgctctgaaaaatggatttatcgccagcaactgcttcaatggcggaggcggatctcaccaccatcatcaccatggatcaatcgatgatcccaagaagaaacgcaaggtggatcccaagaagaagaggaaagtagaccccaagaaaaagaggaaggtgggatcaactgggtctcgcggaggtggggggtcaggcggaggtggctcaggaggcggaggctcagggcgcgccggatccggacgcgccgacgcgctggacgatttcgatctcgacatgctgggttctgatgccctcgatgactttgacctggatatgttgggaagcgacgcattggatgactttgatctggacatgctcggctccgatgctctggacgatttcgatctcgatatgttatatggcggccgcggaggcggcggttccggaggtggtggaagtgggggtggagggtctccgaagaaaaagcgcaaggtcgggccggccggtggaggaggtagcgctgagtactgcctttcatacgagaccgagatcctgactgtcgagtacggattgcttcctatcggcaaaatcgtggagaagaggattgaatgtaccgtctattcagtcgataataatgggaacatctacacacagcccgtggctcaatggcacgacagaggagagcaggaagtttttgaatactgtctcgaggacggatccctcatccgcgctactaaagatcataagtttatgaccgtggacggccagatgctgccaattgacgaaatttttgaacgagagctggatctgatgagagtcgacaaccttccaaactgattaattaagcgtcg

SEQ ID NO: 217 - DNA, 977 bp, Artificial Sequence
  Synthetic Polynucleotide
cgcagcaccggtgccgccaccatgagcactggaaagcgagttagcatcaaggacttgctggacgaaaaggatttcgaaatttgggcaatcaatgagcagaccatgaaactggagtctgcaaaggtgtcccgggtgttttgcacgggtaagaagcttgtttatatccttaaaactagactgggccggacgatcaaagccaccgcgaaccacagattcttgacaatcgacgggtggaaacggctggacgaactgagcttgaaggagcacatcgcccttcctcggaagctcgagtcatcttccctgcagctgagtcccgaaatcgaaaagctctctcagagcgatatatattgggactccatcgtaagcataacagagacgggggtcgaggaggtgttcgatctgacagttcctgggcctcataatttcgtagcgaacgacatcattgtacataactccattgaaggcggaggcggatctcaccaccatcatcaccatggatcaatcgatgatcccaagaagaaacgcaaggtggatcccaagaagaagaggaaagtagaccccaagaaaaagaggaaggtgggatcaactgggtctcgcggaggtggggggtcaggcggaggtggctcaggaggcggaggctcagggcgcgccggatccggacgcgccgacgcgctggacgatttcgatctcgacatgctgggttctgatgccctcgatgactttgacctggatatgttgggaagcgacgcattggatgactttgatctggacatgctcggctccgatgctctggacgatttcgatctcgatatgttatatggcggccgcggaggcggcggttccggaggtggtggaagtgggggtggagggtctccgaagaaaaagcgcaaggtcgggccggccggtggaggaggtagcgaatccggatgtatcagtggcgactccctgatctcactcgcatgattaattaagcgtag

SEQ ID NO: 218 - DNA, 4304 bp, Artificial Sequence
  Synthetic Polynucleotide
ctttcctgcgttatcccctgattctgtggataaccgtattaccgcctttgagtgagctgataccgctcgccgcagccgaacgaccgagcgcagcgagtcagtgagcgaggaagcggaagagcgcccaatacgcaaaccgcctctccccgcgcgttggccgattcattaatgcagctggcacgacaggtttcccgactggaaagcgggcagtgagcgcaacgcaattaatacgcgtaccgctagccaggaagagtttgtagaaacgcaaaaaggccatccgtcaggatggccttctgcttagtttgatgcctggcagtttatggcgggcgtcctgcccgccaccctccgggccgttgcttcacaacgatcaaatccgctcccggcggatttgtcctactcaggagagcgttcaccgacaaacaacagataaaacgaaaggcccagtcttccgactgagcctttcgttttatttgatgcctggcagttccctactctcgcgttaacgctagcatggatgttttcccagtcacgacgttgtaaaacgacggccagtcttaagctcgggccccaaataatgattttattttgactgatagtgacctgttcgttgcaacaaattgatgagcaatgcttttttataatgccaactttgtacaaaaaagcaggctccgaattcaccggtgccgccaccatggggccggccgcggccgcattaggcaccccaggctttacactttatgcttccggctcgtataatgtgtggattttgagttaggatccgtcgagattttcaggagctaaggaagctaaaatggagaaaaaaatcactggatataccaccgttgatatatcccaatggcatcgtaaagaacattttgaggcatttcagtcagttgctcaatgtacctataaccagaccgttcagctggatattacggcctttttaaagaccgtaaagaaaaataagcacaagttttatccggcctttattcacattcttgcccgcctgatgaatgctcatccggaattccgtatggcaatgaaagacggtgagctggtgatatgggatagtgttcacccttgttacaccgttttccatgagcaaactgaaaccttttcatcgctctggagtgaataccacgacgatttccggcagtttctacacatatattcgcaagatgtggcgtgttacggtgaaaacctggcctatttccctaaagggtttattgagaatatgtttttcgtctcagccaatccctgggtgagtttcaccagttttgatttaaacgtggccaatatggacaacttcttcgcccccgttttcaccatgggcaaatattatacgcaaggcgacaaggtgctgatgccgctggcgattcaggttcatcatgccgtttgtgatggcttccatgtcggcagaatgcttaatgaattacaacagtactgcgatgagtggcagggcggggcgtaaagatctggatccggcttactaaaagccagataacagtatgcgtatttgcgcgctgatttttgcggtataagaatatatactgatatgtatacccgaagtatgtcaaaaagaggtatgctatgaagcagcgtattacagtgacagttgacagcgacagctatcagttgctcaaggcatatatgatgtcaatatctccggtctggtaagcacaaccatgcagaatgaagcccgtcgtctgcgtgccgaacgctggaaagcggaaaatcaggaagggatggctgaggtcgcccggtttattgaaatgaacggctcttttgctgacgagaacaggggctggtgaaatgcagtttaaggtttacacctataaaagagagagccgttatcgtctgtttgtggatgtacagagtgatattattgacacgcccgggcgacggatggtgatccccctggccagtgcacgtctgctgtcagataaagtctcccgtgaactttacccggtggtgcatatcggggatgaaagctggcgcatgatgaccaccgatatggccagtgtgccggtctccgttatcggggaagaagtggctgatctcagccaccgcgaaaatgacatcaaaaacgccattaacctgatgttctggggaatataaatgtcaggctcccttatacacagccagtctgcaggtcgacaacgtttgattaattaagaattcgacccagctttcttgtacaaagttggcattataaaaaataattgctcatcaatttgttgcaacgaacaggtcactatcagtcaaaataaaatcattatttgccatccagctgatatcccctatagtgagtcgtattacatggtcatagctgtttcctggcagctctggcccgtgtctcaaaatctctgatgttacattgcacaagataaaaatatatcatcatgcctcctctagaccagccaggacagaaatgcctcgacttcgctgctgcccaaggttgccgggtgacgcacaccgtggaaacggatgaaggcacgaacccagtggacataagcctgttcggttcgtaagctgtaatgcaagtagcgtatgcgctcacgcaactggtccagaaccttgaccgaacgcagcggtggtaacggcgcagtggcggttttcatggcttgttatgactgtttttttggggtacagtctatgcctcgggcatccaagcagcaagcgcgttacgccgtgggtcgatgtttgatgttatggagcagcaacgatgttacgcagcagggcagtcgccctaaaacaaagttaaacatcatgagggaagcggtgatcgccgaagtatcgactcaactatcagaggtagttggcgtcatcgagcgccatctcgaaccgacgttgctggccgtacatttgtacggctccgcagtggatggcggcctgaagccacacagtgatattgatttgctggttacggtgaccgtaaggcttgatgaaacaacgcggcgagctttgatcaacgaccttttggaaacttcggcttcccctggagagagcgagattctccgcgctgtagaagtcaccattgttgtgcacgacgacatcattccgtggcgttatccagctaagcgcgaactgcaatttggagaatggcagcgcaatgacattcttgcaggtatcttcgagccagccacgatcgacattgatctggctatcttgctgacaaaagcaagagaacatagcgttgccttggtaggtccagcggcggaggaactctttgatccggttcctgaacaggatctatttgaggcgctaaatgaaaccttaacgctatggaactcgccgcccgactgggctggcgatgagcgaaatgtagtgcttacgttgtcccgcatttggtacagcgcagtaaccggcaaaatcgcgccgaaggatgtcgctgccgactgggcaatggagcgcctgccggcccagtatcagcccgtcatacttgaagctagacaggcttatcttggacaagaagaagatcgcttggcctcgcgcgcagatcagttggaagaatttgtccactacgtgaaaggcgagatcaccaaggtagtcggcaaataaccctcgagccacccatgaccaaaatcccttaacgtgagttacgcgtcgttccactgagcgtcagaccccgtagaaaagatcaaaggatcttcttgagatcctttttttctgcgcgtaatctgctgcttgcaaacaaaaaaaccaccgctaccagcggtggtttgtttgccggatcaagagctaccaactctttttccgaaggtaactggcttcagcagagcgcagataccaaatactgtccttctagtgtagccgtagttaggccaccacttcaagaactctgtagcaccgcctacatacctcgctctgctaatcctgttaccagtggctgctgccagtggcgataagtcgtgtcttaccgggttggactcaagacgatagttaccggataaggcgcagcggtcgggctgaacggggggttcgtgcacacagcccagcttggagcgaacgacctacaccgaactgagatacctacagcgtgagcattgagaaagcgccacgcttcccgaagggagaaaggcggacaggtatccggtaagcggcagggtcggaacaggagagcgcacgagggagcttccagggggaaacgcctggtatctttatagtcctgtcgggtttcgccacctctgacttgagcgtcgatttttgtgatgctcgtcaggggggcggagcctatggaaaaacgccagcaacgcggcctttttacggttcctggccttttgctggccttttgctcacatgtt
